(19) United States
(12) Patent Application Publication
(10) Pub. No.: US 2011/0035841 A1
(43) Pub. Date: Feb. 10, 2011

(54) Lipid Metabolism Proteins, Combinations of Lipid Metabolism Proteins and Uses Thereof

(75) Inventors: Gunnar Plesch, Potsdam (DE); Piotr Puzio, Mariakerke (Gent) (BE); Astrid Blau, Stahnsdorf (DE); Michael Manfred Herold, Berlin (DE); Birgit Wendel, Berlin (DE); Beate Kamlage, Berlin (DE); Florian Schauwecker, Berlin (DE); Thorsten Zank, Mannheim (DE); Oliver Oswald, Lautertal (DE); Tom Wetjen, Mannheim (DE)

Correspondence Address: CONNOLLY BOVE LODGE & HUTZ, LLP, P O BOX 2207, WILMINGTON, DE, 19899, US

(73) Assignee: BASF Plant Science GmbH, Ludwigshafen (DE)

(21) Appl. No.: 12/808,703

(22) PCT Filed: Dec. 10, 2008
(86) PCT No.: PCT/EP2008/067233

§ 371 Date: Jun. 17, 2010

(30) Foreign Application Priority Data
Dec. 17, 2007 (EP) 07150060.7

(51) Int. Cl. C12N 15/82; C07H 21/02; C07H 21/04; C12N 15/63; C12N 5/10; C12P 21/02; C07K 14/25; C07K 14/245; C07K 16/12; A01H 5/00

(52) U.S. Cl. 800/281; 536/23.7; 435/320.1; 435/325; 435/69.1; 530/324; 530/387.9; 800/298; 800/278; 536/23.6; 435/419

(57) ABSTRACT

Described herein are inventions in the field of genetic engineering of plants, including combinations of polynucleotides encoding LMPs to improve agronomic, horticultural, and quality traits. This invention also relates to the combination of polynucleotides encoding proteins that are related to the presence of seed storage compounds in plants. More specifically, the present invention relates to LMP polynucleotides encoding lipid metabolism proteins (LMP) and the use of these combinations of these sequences, their order and direction in the combination, and the regulatory elements used to control expression and transcript termination in these combinations in transgenic plants. In particular, the invention is directed to methods for manipulating fatty acid-related compounds and for increasing oil and starch levels and altering the fatty acid composition in plants and seeds. The invention further relates to methods of using these novel combinations of polypeptides to stimulate plant growth, and/or root growth and/or to increase yield and/or composition of seed storage compounds.

[0001] Described herein are inventions in the field of genetic engineering of plants, including combinations of polynucleotides encoding LMPs to improve agronomic, horticultural, and quality traits. This invention also relates to the combination of polynucleotides encoding proteins that are related to the presence of seed storage compounds in plants. More specifically, the present invention relates to LMP polynucleotides encoding lipid metabolism proteins (LMP) and the use of these combinations of these sequences, their order and direction in the combination, and the regulatory elements used to control expression and transcript termination in these combinations in transgenic plants. In particular, the invention is directed to methods for manipulating fatty acid-related compounds and for increasing oil, protein and/or starch levels and altering the fatty acid composition in plants and seeds. The invention further relates to methods of using these novel combinations of polypeptides to stimulate plant growth, and/or root growth and/or to increase yield and/or composition of seed storage compounds.

[0002] The study and genetic manipulation of plants has a long history that began even before the framed studies of Gregor Mendel. In perfecting this science, scientists have accomplished modification of particular traits in plants ranging from potato tubers having increased starch content to oilseed plants such as canola and sunflower having increased or altered fatty acid content. With the increased consumption and use of plant oils, the modification of seed oil content and seed oil levels has become increasingly widespread (e.g. Töpfer et al. 1995, Science 268:681-686). Manipulation of biosynthetic pathways in transgenic plants provides a number of opportunities for molecular biologists and plant biochemists to affect plant metabolism giving rise to the production of specific higher-value products. The seed oil production or composition has been altered in numerous traditional oilseed plants such as soybean (U.S. Pat. No. 5,955,650), canola (U.S. Pat. No. 5,955,650), sunflower (U.S. Pat. No. 6,084,164), and rapeseed (Töpfer et al. 1995, Science 268:681-686), and non-traditional oil seed plants such as tobacco (Cahoon et al. 1992, Proc. Natl. Acad. Sci. USA 89:11184-11188).

[0003] Plant seed oils comprise both neutral and polar lipids (see Table 1). The neutral lipids contain primarily triacylglycerol, which is the main storage lipid that accumulates in oil bodies in seeds. The polar lipids are mainly found in the various membranes of the seed cells, e.g. the endoplasmic reticulum, microsomal membranes, plastidial and mitochondrial membranes and the cell membrane. The neutral and polar lipids contain several common fatty acids (see Table 2) and a range of less common fatty acids. The fatty acid composition of membrane lipids is highly regulated and only a select number of fatty acids are found in membrane lipids. On the other hand, a large number of unusual fatty acids can be incorporated into the neutral storage lipids in seeds of many plant species (Van de Loo F. J. et al. 1993, Unusual Fatty Acids in Lipid Metabolism in Plants pp. 91-126, editor TS Moore Jr. CRC Press; Millar et al. 2000, Trends Plant Sci. 5:95-101).

[0004] Lipids are synthesized from fatty acids and their synthesis may be divided into two parts: the prokaryotic pathway and the eukaryotic pathway (Browse et al. 1986, Biochemical J. 235:25-31; Ohlrogge & Browse 1995, Plant Cell 7:957-970). The prokaryotic pathway is located in plastids that are also the primary site of fatty acid biosynthesis. Fatty acid synthesis begins with the conversion of acetyl-CoA to malonyl-CoA by acetyl-CoA carboxylase (ACCase). Malonyl-CoA is converted to malonyl-acyl carrier protein (ACP) by the malonyl-CoA:ACP transacylase. The enzyme beta-keto-acyl-ACP-synthase III (KAS III) catalyzes a condensation reaction, in which the acyl group from acetyl-CoA is transferred to malonyl-ACP to form 3-ketobutyryl-ACP. In a subsequent series of condensation, reduction and dehydration reactions the nascent fatty acid chain on the ACP cofactor is elongated by the step-by-step addition (condensation) of two carbon atoms donated by malonyl-ACP until a 16- or 18-carbon saturated fatty acid chain is formed. The plastidial delta-9 acyl-ACP desaturase introduces the first double bond into the fatty acid.

[0005] In the prokaryotic pathway the saturated and monounsaturated acyl-ACPs are direct substrates for the plastidial glycerol-3-phosphate acyltransferase and the lysophosphatidic acid acyltransferase, which catalyze the esterification of glycerol-3-phosphate at the sn-1 and sn-2 position. The resulting phosphatidic acid is the precursor for plastidial lipids, in which further desaturation of the acyl-residues can occur.

[0006] In the eukaryotic lipid biosynthesis pathway thioesterases cleave the fatty acids from the ACP cofactor and free fatty acids are exported to the cytoplasm where they participate as fatty acyl-CoA esters in the eukaryotic pathway. In this pathway the fatty acids are esterified by glycerol-3-phosphate acyltransferase and lysophosphatidic acid acyl-transferase to the sn-1 and sn-2 positions of glycerol-3-phosphate, respectively, to yield phosphatidic acid (PA). The PA is the precursor for other polar and neutral lipids, the latter being formed in the Kennedy of other pathways (Voelker 1996, Genetic Engineering ed.: Setlow 18:111-113; Shanklin & Cahoon 1998, Annu. Rev. Plant Physiol. Plant Mol. Biol. 49:611-641; Frentzen 1998, Lipids 100:161-166; Millar et al. 2000, Trends Plant Sci. 5:95-101).

[0007] The acyl-CoAs resulted from the export of plastidic fatty acids can also be elongated to yield very-long-chain fatty acids with more than 18 carbon atoms. Fatty acid elongases are multienzyme complexes consisting of at least four enzyme activities: beta-ketoacyl-CoA synthases, beta-ketoacyl-CoA reductase, beta-hydroxyacyl-CoA dehydratase and enoyl-CoA reductase. It is well known that the beta-ketoacyl-CoA synthase determines the activity and the substrate selectivity of the fatty acid elongase complex (Millar & Kunst 1997, Plant J. 12:121-131). The very-long-chain fatty acids can be either used for wax and sphingolipid biosynthesis or enter the pathways for seed storage lipid biosynthesis. Storage lipids in seeds are synthesized from carbohydrate-derived precursors. Plants have a complete glycolytic pathway in the cytosol (Plaxton 1996, Annu. Rev. Plant Physiol. Plant Mol. Biol. 47:185-214), and it has been shown that a complete pathway also exists in the plastids of rapeseeds (Kang & Rawsthorne 1994, Plant J. 6:795-805). Sucrose is the primary source of carbon and energy, transported from the leaves into the developing seeds. During the storage phase of seeds, sucrose is converted in the cytosol to provide the metabolic precursors glucose-6-phosphate and pyruvate. These are transported into the plastids and converted into acetyl-CoA that serves as the primary precursor for the synthesis of fatty acids. Acetyl-CoA in the plastids is the central precursor for lipid biosynthesis. Acetyl-CoA can be formed in the plastids by different reactions and the exact contribution of each reaction is still being debated (Ohlrogge & Browse 1995, Plant Cell 7:957-970). It is however accepted that a large part of the acetyl-CoA is derived from glucose-6-phospate and pyruvate that are imported from the cytoplasm into the plastids. Sucrose is produced in the source organs (leaves, or anywhere where photosynthesis occurs) and is transported to the developing seeds that are also termed sink organs. In the developing seeds, sucrose is the precursor for all the storage compounds, i.e. starch, lipids, and partly the seed storage proteins.

[0008] Generally the breakdown of lipids is considered to be performed in plants in peroxisomes in the process know as beta-oxidation. This proecess involves the enzymatic reactions of acyl-CoA oxidase, hydroxyacyl-CoA-dehydrogenase (both found as a multifunctional complex) and ketoacyl-CoA-thiolase, with catalase in a supporting role (Graham and Eastmond 2002). In addition to the breakdown of common fatty acids beta-oxidation also plays a role in the removal of unusual fatty acids and fatty acid oxidation products, the glyoxylate cycle and the metabolism of branched chain amino acids (Graham and Eastmond 2002). Storage compounds, such as triacylglycerols (seed oil), serve as carbon and energy reserves, which are used during germination and growth of the young seedling. Seed (vegetable) oil is also an essential component of the human diet and a valuable commodity providing feedstocks for the chemical industry.

[0009] Although the lipid and fatty acid content, and/or composition of seed oil, can be modified by the traditional methods of plant breeding, the advent of recombinant DNA technology has allowed for easier manipulation of the seed oil content of a plant, and in some cases, has allowed for the alteration of seed oils in ways that could not be accomplished by breeding alone (see, e.g., Töpfer et al., 1995, Science 268:681-686). For example, introduction of a Δ¹²-hydroxylase nucleic acid sequence into transgenic tobacco resulted in the introduction of a novel fatty acid, ricinoleic acid, into the tobacco seed oil (Van de Loo et al. 1995, Proc. Natl. Acad. Sci USA 92:6743-6747). Tobacco plants have also been engineered to produce low levels of petroselinic acid by the introduction and expression of an acyl-ACP desaturase from coriander (Cahoon et al. 1992, Proc. Natl. Acad. Sci USA 89:11184-11188).

[0010] The modification of seed oil content in plants has significant medical, nutritional and economic ramifications. With regard to the medical ramifications, the long chain fatty acids (C18 and longer) found in many seed oils have been linked to reductions in hypercholesterolemia and other clinical disorders related to coronary heart disease (Brenner 1976, Adv. Exp. Med. Biol. 83:85-101). Therefore, consumption of a plant having increased levels of these types of fatty acids may reduce the risk of heart disease. Enhanced levels of seed oil content also increase large-scale production of seed oils and thereby reduce the cost of these oils.

[0011] In order to increase or alter the levels of compounds such as seed oils in plants, nucleic acid sequences and proteins regulating lipid and fatty acid metabolism must be identified. As mentioned earlier, several desaturase nucleic acids such as the Δ⁶-desaturase nucleic acid, Δ¹²-desaturase nucleic acid and acyl-ACP desaturase nucleic acid have been cloned and demonstrated to encode enzymes required for fatty acid synthesis in various plant species. Oleosin nucleic acid sequences from such different species as canola, soybean, carrot, pine, and Arabidopsis thaliana have also been cloned and determined to encode proteins associated with the phospholipid monolayer membrane of oil bodies in those plants.

[0012] Although several compounds are known that generally affect plant and seed development, there is a clear need to specifically identify factors, and particularly combinations thereof, that are more specific for the developmental regulation of storage compound accumulation and to identify combination of genes which have the capacity to confer altered or increased oil production to its host plant and to other plant species. One embodiment of this invention discloses combinations of nucleic acid sequences from Arabidopsis thaliana, Brassica napus, Helianthus annuus, Escherichia coli, Saccharomyces cerevisiae or Physcomitrella patens. These combinations of nucleic acid sequences can be used to alter or increase the levels of seed storage compounds such as proteins, starches, sugars and oils, in plants, including transgenic plants, such as canola, linseed, soybean, sunflower, maize, oat, rye, barley, wheat, rice, pepper, tagetes, cotton, oil palm, coconut palm, flax, castor, and peanut, which are oilseed plants containing considerable amounts of lipid compounds.

[0013] Although several compounds are known that generally affect plant and seed development, there is a clear need to specifically identify factors that are more specific for the developmental regulation of storage compound accumulation and to identify genes which have the capacity to confer altered or increased oil production to its host plant and to other plant species.

[0014] Thus, this invention, in principle, discloses nucleic acid sequences and combinations thereof which can be used to alter or increase the levels of seed storage compounds such as proteins, sugars and oils, in plants, including transgenic plants, such as canola, linseed, soybean, sunflower, maize, oat, rye, barley, wheat, rice, pepper, tagetes, cotton, oil palm, coconut palm, flax, castor and peanut, which are oilseed plants containing considerable amounts of lipid compounds.

[0015] Specifically, the present invention relates to a polynucleotide comprising a nucleic acid sequences selected from the group consisting of:
[0016] (a) a nucleic acid sequence as shown in SEQ ID NO: 436, 438, 440, 442 or 444;
[0017] (b) a nucleic acid sequence encoding a polypeptide having an amino acid sequence as shown in SEQ ID NO: 437, 439, 441, 443 or 445;
[0018] (c) a nucleic acid sequence which is at least 70% identical to the nucleic acid sequence of (a) or (b), wherein said nucleic acid sequence encodes a polypeptide having lipoprotein activity and wherein said polypeptide comprises at least one of the amino acid sequences shown in SEQ ID NO: 448 or 449; and
[0019] (d) a nucleic acid sequence being a fragment of any one of (a) to (c), wherein said fragment encodes a polypeptide or biologically active portion thereof having lipoprotein activity and wherein said polypeptide comprises at least one of the amino acid sequences shown in SEQ ID NO: 448 or 449.

[0020] The term “polynucleotide” as used in accordance with the present invention relates to a polynucleotide comprising a nucleic acid sequence which encodes a polypeptide having lipoprotein activity, i.e. being capable of specifically binding to lipids. More preferably, the polypeptide encoded by the polynucleotide of the present invention having lipoprotein activity shall be capable of increasing the amount of seed storage compounds, preferably, fatty acids or lipids, when present in plant seeds. The polypeptides encoded by the polynucleotide of the present invention are also referred to as lipid metabolism proteins (LMP) herein below. Suitable assays for measuring the activities mentioned before are described in the accompanying Examples. Preferably, the polynucleotide of the present invention upon expression in a plant seed shall be capable of significantly increasing the seed storage of lipids or fatty acids.

[0021] Preferably, the polynucleotide of the present invention upon expression in the seed of a transgenic plant is capable of significantly increasing the amount by weight of at least one seed storage compound. More preferably, such an increase as referred to in accordance with the present invention is an increase of the amount by weight of at least 1, 2.5, 5, 7.5, 10, 12.5, 15, 17.5, 20, 22.5 or 25% as compared to a control. Whether an increase is significant can be determined by statistical tests well known in the art including, e.g., Student's t-test. The percent increase rates of a seed storage compound are, preferably, determined compared to an empty vector control. An empty vector control is a transgenic plant, which has been transformed with the same vector or construct as a transgenic plant according to the present invention except for such a vector or construct is lacking the polynucleotide of the present invention. Alternatively, an untreated plant (i.e. a plant which has not been genetically manipulated) may be used as a control.

[0022] A polynucleotide encoding a polypeptide having a biological activity as specified above has been obtained in accordance with the present invention, preferably, from E. coli. The corresponding polynucleotides, preferably, comprises the nucleic acid sequence shown in SEQ ID NO: 436, 438, 440, 442 and 444, respectively, encoding a polypeptide having the amino acid sequence of SEQ ID NO: 437, 439, 441, 443 and 445, respectively. It is to be understood that a polypeptide having an amino acid sequence as shown in SEQ ID NO: 437, 439, 441, 443 or 445 may be also encoded due to the degenerated genetic code by other polynucleotides as well.

[0023] Moreover, the term “polynucleotide” as used in accordance with the present invention further encompasses variants of the aforementioned specific polynucleotides. Said variants may represent orthologs, paralogs or other homologs of the polynucleotide of the present invention.

[0024] The polynucleotide variants, preferably, also comprise a nucleic acid sequence characterized in that the sequence can be derived from the aforementioned specific nucleic acid sequences shown in SEQ ID NO: 436, 438, 440, 442 or 444 by at least one nucleotide substitution, addition and/or deletion whereby the variant nucleic acid sequence shall still encode a polypeptide having a biological activity as specified above. Variants also encompass polynucleotides comprising a nucleic acid sequence which is capable of hybridizing to the aforementioned specific nucleic acid sequences, preferably, under stringent hybridization conditions. These stringent conditions are known to the skilled worker and can be found in Current Protocols in Molecular Biology, John Wiley & Sons, N.Y. (1989), 6.3.1-6.3.6. A preferred example for stringent hybridization conditions are hybridization conditions in 6× sodium chloride/sodium citrate (=SSC) at approximately 45° C., followed by one or more wash steps in 0.2×SSC, 0.1% SDS at 50 to 65° C. The skilled worker knows that these hybridization conditions differ depending on the type of nucleic acid and, for example when organic solvents are present, with regard to the temperature and concentration of the buffer. For example, under “standard hybridization conditions” the temperature differs depending on the type of nucleic acid between 42° C. and 58° C. in aqueous buffer with a concentration of 0.1 to 5×SSC (pH 7.2). If organic solvent is present in the abovementioned buffer, for example 50% formamide, the temperature under standard conditions is approximately 42° C. The hybridization conditions for DNA:DNA hybrids are, preferably, 0.1×SSC and 20° C. to 45° C., preferably between 30° C. and 45° C. The hybridization conditions for DNA:RNA hybrids are, preferably, 0.1×SSC and 30° C. to 55° C., preferably between 45° C. and 55° C. The abovementioned hybridization temperatures are determined for example for a nucleic acid with approximately 100 bp (=base pairs) in length and a G+C content of 50% in the absence of formamide. The skilled worker knows how to determine the hybridization conditions required by referring to textbooks such as the textbook mentioned above, or the following textbooks: Sambrook et al., “Molecular Cloning”, Cold Spring Harbor Laboratory, 1989; Hames and Higgins (Ed.) 1985, “Nucleic Acids Hybridization: A Practical Approach”, IRL Press at Oxford University Press, Oxford; Brown (Ed.) 1991, “Essential Molecular Biology: A Practical Approach”, IRL Press at Oxford University Press, Oxford. Alternatively, polynucleotide variants are obtainable by PCR-based techniques such as mixed oligonucleotide primer-based amplification of DNA, i.e. using degenerated primers against conserved domains of the polypeptides of the present invention. Conserved domains of the polypeptide of the present invention may be identified by a sequence comparison of the nucleic acid sequences of the polynucleotides or the amino acid sequences of the polypeptides of the present invention. Oligonucleotides suitable as PCR primers as well as suitable PCR conditions are described in the accompanying Examples. As a template, DNA or cDNA from bacteria, fungi, plants or animals may be used. Further, variants include polynucleotides comprising nucleic acid sequences which are at least 70%, at least 75%, at least 80%, at least 85%, at least 90%, at least 95%, at least 98% or at least 99% identical to the nucleic acid sequences shown in SEQ ID NO: 436, 438, 440, 442 or 444 encoding polypeptides retaining a biological activity as specified above. More preferably, said variant polynucleotides encode polypeptides comprising a amino acid sequence patterns shown in SEQ ID NOs: 448 and/or 449. Moreover, also encompassed are polynucleotides which comprise nucleic acid sequences encoding amino acid sequences which are at least 70%, at least 75%, at least 80%, at least 85%, at least 90%, at least 95%, at least 98% or at least 99% identical to the amino acid sequences shown in SEQ ID NO: 437, 439, 441, 443 or 445 wherein the polypeptide comprising the amino acid sequence retains a biological activity as specified above. More preferably, said variant polypeptide comprises the amino acid sequence patterns shown in SEQ ID NOs: 448 and/or 449. The percent identity values are, preferably, calculated over the entire amino acid or nucleic acid sequence region. A series of programs based on a variety of algorithms is available to the skilled worker for comparing different sequences. In this context, the algorithms of Needleman and Wunsch or Smith and Waterman give particularly reliable results. To carry out the sequence alignments, the program PileUp (J. Mol. Evolution., 25, 351-360, 1987, Higgins et al., CABIOS, 5 1989: 151-153) or the programs Gap and BestFit (Needleman and Wunsch (J. Mol. Biol. 48; 443-453 (1970)) and Smith and Waterman (Adv. Appl. Math. 2; 482-489 (1981))), which are part of the GCG software packet [Genetics Computer Group, 575 Science Drive, Madison, Wis., USA 53711 (1991)], are to be used. The sequence identity values recited above in percent (%) are to be determined, preferably, using the program GAP over the entire sequence region with the following settings: Gap Weight: 50, Length Weight: 3, Average Match: 10.000 and Average Mismatch: 0.000, which, unless otherwise specified, shall always be used as standard settings for sequence alignments. For the purposes of the invention, the percent sequence identity between two nucleic acid or polypeptide sequences can be also determined using the Vector NTI 7.0 (PC) software package (InforMax, 7600 Wisconsin Ave., Bethesda, Md. 20814). A gap-opening penalty of 15 and a gap extension penalty of 6.66 are used for determining the percent identity of two nucleic acids. A gap-opening penalty of 10 and a gap extension penalty of 0.1 are used for determining the percent identity of two polypeptides. All other parameters are set at the default settings. For purposes of a multiple alignment (Clustal W algorithm), the gap-opening penalty is 10, and the gap extension penalty is 0.05 with blosum62 matrix. It is to be understood that for the purposes of determining sequence identity when comparing a DNA sequence to an RNA sequence, a thymidine nucleotide sequence is equivalent to an uracil nucleotide.

[0025] A polynucleotide comprising a fragment of any of the aforementioned nucleic acid sequences is also encompassed as a polynucleotide of the present invention. The fragment shall encode a polypeptide which still has a biological activity as specified above. Accordingly, the polypeptide may comprise or consist of the domains of the polypeptide of the present invention conferring the said biological activity. A fragment as meant herein, preferably, comprises at least 20, at least 50, at least 100, at least 250 or at least 500 consecutive nucleotides of any one of the aforementioned nucleic acid sequences or encodes an amino acid sequence comprising at least 20, at least 30, at least 50, at least 80, at least 100 or at least 150 consecutive amino acids of any one of the aforementioned amino acid sequences. More preferably, said variant polynucleotides encode a polypeptide comprising at least one or both of the amino acid sequence patterns shown in SEQ ID NOs: 448 or 449.

[0026] The variant polynucleotides or fragments referred to above, preferably, encode polypeptides retaining at least 10%, at least 20%, at least 30%, at least 40%, at least 50%, at least 60%, at least 70%, at least 80% or at least 90% of the lipoprotein activity exhibited by the polypeptide shown in SEQ ID NO: 437, 439, 441, 443 or 445. The activity may be tested as described in the accompanying Examples.

[0027] The polynucleotides of the present invention either essentially consist of the aforementioned nucleic acid sequences or comprise the aforementioned nucleic acid sequences. Thus, they may contain further nucleic acid sequences as well. Preferably, the polynucleotide of the present invention may comprise in addition to an open reading frame further untranslated sequence at the 3′ and at the 5′ terminus of the coding gene region: at least 500, preferably 200, more preferably 100 nucleotides of the sequence upstream of the 5′ terminus of the coding region and at least 100, preferably 50, more preferably 20 nucleotides of the sequence downstream of the 3′ terminus of the coding gene region. Furthermore, the polynucleotides of the present invention may encode fusion proteins wherein one partner of the fusion protein is a polypeptide being encoded by a nucleic acid sequence recited above. Such fusion proteins may comprise as additional part other enzymes of the fatty acid or lipid biosynthesis pathways, polypeptides for monitoring expression (e.g., green, yellow, blue or red fluorescent proteins, alkaline phosphatase and the like) or so called “tags” which may serve as a detectable marker or as an auxiliary measure for purification purposes. Tags for the different purposes are well known in the art and comprise FLAG-tags, 6-histidine-tags, MYC-tags and the like.

[0028] Variant polynucleotides as referred to in accordance with the present invention may be obtained by various natural as well as artificial sources. For example, polynucleotides may be obtained by in vitro and in vivo mutagenesis approaches using the above mentioned mentioned specific polynucleotides as a basis. Moreover, polynucleotids being homologs or orthologs may be obtained from various animal, plant, bacteria or fungus species. Paralogs may be identified from E. coli.

[0029] The polynucleotide of the present invention shall be provided, preferably, either as an isolated polynucleotide (i.e. isolated from its natural context such as a gene locus) or in genetically modified or exogenously (i.e. artificially) manipulated form. An isolated polynucleotide can, for example, comprise less than approximately 5 kb, 4 kb, 3 kb, 2 kb, 1 kb, 0.5 kb or 0.1 kb of nucleotide sequences which naturally flank the nucleic acid molecule in the genomic DNA of the cell from which the nucleic acid is derived. The polynucleotide, preferably, is double or single stranded DNA including cDNA or RNA including antisense-, micro-, and siRNAs. The term encompasses single- as well as double-stranded polynucleotides. Moreover, comprised are also chemically modified polynucleotides including naturally occurring modified polynucleotides such as glycosylated or methylated polynucleotides or artificial modified ones such as biotinylated polynucleotides.

[0030] The polynucleotide encoding a polypeptide having a biological activity as specified encompassed by the present invention is also, preferably, a polynucleotide having a nucleic acid sequence which has been adapted to the specific codon-usage of the organism, e.g., the plant species, in which the polynucleotide shall be expressed (i.e. the target organism). This is, in general, achieved by changing the codons of a nucleic acid sequence obtained from a first organism (i.e. the donor organism) encoding a given amino acid sequence into the codons normally used by the target organism whereby the amino acid sequence is retained. It is in principle acknowledged that the genetic code is redundant (i.e. degenerated). Specifically, 61 codons are used to encode only 20 amino acids. Thus, a majority of the 20 amino acids will be encoded by more than one codon. The codons for the amino acids are well known in the art and are universal to all organisms. However, among the different codons which may be used to encode a given amino acid, each organism may preferably use certain codons. The presence of rarely used codons in a nucleic acid sequence will result a depletion of the respective tRNA pools and, thereby, lower the translation efficiency. Thus, it may be advantageous to provide a polynucleotide comprising a nucleic acid sequence encoding a polypeptide as referred to above wherein said nucleic acid sequence is optimized for expression in the target organism with respect to the codon usage. In order to optimize the codon usage for a target organism, a plurality of known genes from the said organism may be investigated for the most commonly used codons encoding the amino acids. In a subsequent step, the codons of a nuclei acid sequence from the donor organism will be optimized by replacing the codons in the donor sequence by the codons most commonly used by the target organism for encoding the same amino acids. It is to be understood that if the same codon is used preferably by both organisms, no replacement will be necessary. For various target organisms, tables with the preferred codon usages are already known in the art; see e.g., http://www.kazusa.or.jp/Kodon/E.html. Moreover, computer programs exist for the optimization, e.g., the Leto software, version 1.0 (Entelechon GmbH, Germany) or the GeneOptimizer (Geneart AG, Germany). For the optimization of a nucleic acid sequence, several criteria may be taken into account. For example, for a given amino acid, always the most commonly used codon may be selected for each codon to be exchanged. Alternatively, the codons used by the target organism may replace those in a donor sequence according to their naturally frequency. Accordingly, at some positions even less commonly used codons of the target organism will appear in the optimized nucleic acid sequence. The distribution of the different replacment codons of the target organism to the donor nucleic acid sequence may be randomly. Preferred target organisms in accordance with the present invention are soybean or canola (Brassica) species. Preferably, the polynucleotide of the present invention has an optimized nucleic acid for codon usage in the envisaged target organism wherein at least 20%, at least 40%, at least 60%, at least 80% or all of the relevant codons are adapted.

[0031] It has been found in the studies underlying one embodiment of the present invention that the polypeptides being encoded by the polynucleotides described above have lipoprotein activity. Moreover, the polypeptides encoded by the polynucleotides of the present invention are, advantageously, capable of increasing the amount of seed storage compounds in plants significantly. Thus, the polynucleotides of the present invention are, in principle, useful for the synthesis of seed storage compounds such as fatty acids or lipids. Moreover, they may be used to generate transgenic plants or seeds thereof having a modified, preferably increased, amount of seed storage compounds. Such transgenic plants or seeds may be used for the manufacture of seed oil or other lipid and/or fatty acid containing compositions.

[0032] Further, the present invention relates to a vector comprising the polynucleotide of the present invention. Preferably, the vector is an expression vector.

[0033] The term “vector”, preferably, encompasses phage, plasmid, viral or retroviral vectors as well as artificial chromosomes, such as bacterial or yeast artificial chromosomes. Moreover, the term also relates to targeting constructs which allow for random or site-directed integration of the targeting construct into genomic DNA. Such target constructs, preferably, comprise DNA of sufficient length for either homolgous recombination or heterologous insertion as described in detail below. The vector encompassing the polynucleotides of the present invention, preferably, further comprises selectable markers for propagation and/or selection in a host. The vector may be incorporated into a host cell by various techniques well known in the art. If introduced into a host cell, the vector may reside in the cytoplasm or may be incorporated into the genome. In the latter case, it is to be understood that the vector may further comprise nucleic acid sequences which allow for homologous recombination or heterologous insertion, see below. Vectors can be introduced into prokaryotic or eukaryotic cells via conventional transformation or transfection techniques. An “expression vector” according to the present invention is characterized in that it comprises an expression control sequence such as promoter and/or enhancer sequence operatively linked to the polynucleotide of the present invention Preferred vectors, expression vectors and transformation or transfection techniques are specified elsewhere in this specification in detail.

[0034] Furthermore, the present invention encompasses a host cell comprising the polynucleotide or vector of the present invention.

[0035] Host cells are primary cells or cell lines derived from multicellular organisms such as plants or animals. Furthermore, host cells encompass prokaryotic or eukaryotic single cell organisms (also referred to as microorganisms), e.g. bacteria or fungi including yeast or bacteria. Primary cells or cell lines to be used as host cells in accordance with the present invention may be derived from the multicellular organisms, preferably from plants. Specifically preferred host cells, microorganisms or multicellular organism from which host cells may be obtained are disclosed below.

[0036] The polynucleotides or vectors of the present invention may be incorporated into a host cell or a cell of a transgenic non-human organism by heterologous insertion or homologous recombination. “Heterologous” as used in the context of the present invention refers to a polynucleotide which is inserted (e.g., by ligation) or is manipulated to become inserted to a nucleic acid sequence context which does not naturally encompass the said polynucleotide, e.g., an artificial nucleic acid sequence in a genome of an organism. Thus, a heterologous polynucleotide is not endogenous to the cell into which it is introduced, but has been obtained from another cell. Generally, although not necessarily, such heterologous polynucleotides encode proteins that are normally not produced by the cell expressing the said heterologous polynucleotide. An expression control sequence as used in a targeting construct or expression vector is considered to be “heterologous” in relation to another sequence (e.g., encoding a marker sequence or an agronomically relevant trait) if said two sequences are either not combined or operatively linked in a different way in their natural environment. Preferably, said sequences are not operatively linked in their natural environment (i.e. originate from different genes). Most preferably, said regulatory sequence is covalently joined (i.e. ligated) and adjacent to a nucleic acid to which it is not adjacent in its natural environment. “Homologous” as used in accordance with the present invention relates to the insertion of a polynucleotide in the sequence context in which the said polynucleotide naturally occurs. Usually, a heterologous polynucleotide is also incorporated into a cell by homologous recombination. To this end, the heterologous polynucleotide is flanked by nucleic acid sequences being homologous to a target sequence in the genome of a host cell or a non-human organism. Homologous recombination now occurs between the homologous sequences. However, as a result of the homologous recombination of the flanking sequences, the heterologous polynucleotide will be inserted, too. How to prepare suitable target constructs for homologous recombination and how to carry out the said homologous recombination is well known in the art.

[0037] Also provided in accordance with the present invention is a method for the manufacture of a polypeptide having lipoprotein activity comprising:

(a) expressing the polynucleotide of the present invention in a host cell; and
(b) obtaining the polypeptide encoded by said polynucleotide from the host cell.

[0038] The polypeptide may be obtained, for example, by all conventional purification techniques including affinity chromatography, size exclusion chromatography, high pressure liquid chromatography (HPLC) and precipitation techniques including antibody precipitation. It is to be understood that the method may—although preferred—not necessarily yield an essentially pure preparation of the polypeptide. It is to be understood that depending on the host cell which is used for the aforementioned method, the polypeptides produced thereby may become posttranslationally modified or processed otherwise.

[0039] The present invention, moreover, pertains to a polypeptide encoded by the polynucleotide of the present invention or which is obtainable by the aforementioned method of the present invention.

[0040] The term “polypeptide” as used herein encompasses essentially purified polypeptides or polypeptide preparations comprising other proteins in addition. Further, the term also relates to the fusion proteins or polypeptide fragments being at least partially encoded by the polynucleotide of the present invention referred to above. Moreover, it includes chemically modified polypeptides. Such modifications may be artificial modifications or naturally occurring modifications such as phosphorylation, glycosylation, myristylation and the like. The terms “polypeptide”, “peptide” or “protein” are used interchangeable throughout this specification. The polypeptide of the present invention shall exhibit the biological activities referred to above, i.e. lipoprotein activity and, more preferably, it shall be capable of increasing the amount of seed storage compounds, preferably, fatty acids or lipids, when present in plant seeds as referred to above.

[0041] Encompassed by the present invention is, furthermore, an antibody which specifically recognizes the polypeptide of the invention.

[0042] Antibodies against the polypeptides of the invention can be prepared by well known methods using a purified polypeptide according to the invention or a suitable fragment derived therefrom as an antigen. A fragment which is suitable as an antigen may be identified by antigenicity determining algorithms well known in the art. Such fragments may be obtained either from the polypeptide of the invention by proteolytic digestion or may be a synthetic peptide. Preferably, the antibody of the present invention is a monoclonal antibody, a polyclonal antibody, a single chain antibody, a human or humanized antibody or primatized, chimerized or fragment thereof. Also comprised as antibodies by the present invention are a bispecific antibody, a synthetic antibody, an antibody fragment, such as Fab, Fv or scFv fragments etc., or a chemically modified derivative of any of these. The antibody of the present invention shall specifically bind (i.e. does significantly not cross react with other polypeptides or peptides) to the polypeptide of the invention. Specific binding can be tested by various well known techniques. Antibodies or fragments thereof can be obtained by using methods which are described, e.g., in Harlow and Lane “Antibodies, A Laboratory Manual”, CSH Press, Cold Spring Harbor, 1988. Monoclonal antibodies can be prepared by the techniques originally described in Köhler and Milstein, Nature 256 (1975), 495, and Galfré, Meth. Enzymol. 73 (1981), 3, which comprise the fusion of mouse myeloma cells to spleen cells derived from immunized mammals. The antibodies can be used, for example, for the immunoprecipitation, immunolocalization or purification (e.g., by affinity chromatography) of the polypeptides of the invention as well as for the monitoring of the presence of said variant polypeptides, for example, in recombinant organisms, and for the identification of compounds interacting with the proteins according to the invention.

[0043] The present invention also relates to a transgenic non-human organism comprising the polynucleotide, the vector or the host cell of the present invention. Preferably, said non-human transgenic organism is a plant.

[0044] The term “non-human transgenic organism”, preferably, relates to a plant, an animal or a multicellular microorganism. The polynucleotide or vector may be present in the cytoplasm of the organism or may be incorporated into the genome either heterologous or by homologous recombination. Host cells, in particular those obtained from plants or animals, may be introduced into a developing embryo in order to obtain mosaic or chimeric organisms, i.e. non-human transgenic organisms comprising the host cells of the present invention. Preferably, the non-human transgenic organism expresses the polynucleotide of the present invention in order to produce the polypeptide in an amount resulting in a detectable lipoprotein activity. Suitable transgenic organisms are, preferably, all those organisms which are capable of synthesizing fatty acids or lipids. Preferred organisms and methods for transgenesis are disclosed in detail below. A transgenic organism or tissue may comprise one or more transgenic cells. Preferably, the organism or tissue is substantially consisting of transgenic cells (i.e., more than 80%, preferably 90%, more preferably 95%, most preferably 99% of the cells in said organism or tissue are transgenic). The term “transgene” as used herein refers to any nucleic acid sequence, which is introduced into the genome of a cell or which has been manipulated by experimental manipulations including techniques such as chimerablasty. Preferably, said sequence is resulting in a genome which is significantly different from the overall genome of an organism (e.g., said sequence, if endogenous to said organism, is introduced into a location different from its natural location, or its copy number is increased or decreased). A transgene may comprise an endogenous polynucleotide (i.e. a polynucleotide having a nucleic acid sequence obtained from the same organism or host cell) or may be obtained from a different organism or hast cell, wherein said different organism is, preferably an organism of another species and the said different host cell is, preferably, a different microorganism, a host cell of a different origin or derived from a an organism of a different species.

[0045] Particularly preferred as a plant to be used in accordance with the present invention are oil producing plant species. Most preferably, the said plant is selected from the group consisting of canola, linseed, soybean, sunflower, maize, oat, rye, barley, wheat, rice, pepper, tagetes, cotton, oil palm, coconut palm, flax, castor and peanut,

[0046] The present invention relates to a method for the manufacture of a lipid and/or a fatty acid comprising the steps of:
[0047] (a) cultivating the host cell or the transgenic non-human organism of the present invention under conditions allowing synthesis of the said lipid or fatty acid; an
[0048] (b) obtaining the said lipid and/or fatty acid from the host cell or the transgenic non-human organism.

[0049] The term “lipid” and “fatty acid” as used herein refer, preferably, to those recited in Table 1 (for lipids) and Table 2 (for fatty acids), below. However, the terms, in principle, also encompass other lipids or fatty acids which can be obtained by the lipid metabolism in a host cell or an organism referred to in accordance with the present invention.

[0050] In a preferred embodiment of the aforementioned method of the present invention, the said lipid and/or fatty acids constitute seed oil.

[0051] Moreover, the present invention pertains to a method for the manufacture of a plant having a modified amount of a seed storage compound, preferably a lipid or a fatty acid, comprising the steps of:
[0052] (a) introducing the polynucleotide or the vector of the present invention into a plant cell; and
[0053] (b) generating a transgenic plant from the said plant cell, wherein the polypeptide encoded by the polynucleotide modifies the amount of the said seed storage compound in the transgenic plant.

[0054] The term “seed storage compound” as used herein, preferably, refers to compounds being a sugar, a protein, or, more preferably, a lipid or a fatty acid. Preferably, the amount of said seed storage compound is significantly increased compared to a control, preferably an empty vector control as specified above. The increase is, more preferably, an increase in the amount by weight of at least 1, 2.5, 5, 7.5, 10, 12.5, 15, 17.5, 20, 22.5 or 25% as compared to a control.

[0055] It is to be understood that the polynucleotides or the vector referred to in accordance with the above method of the present invention may be introduced into the plant cell by any of the aforementioned insertion or recombination techniques.

[0056] Moreover, the present invention contemplates combinations of polynucleotides which are suitable for modifying the amount of seed storage compounds. Specifically, the present invention relates to a fusion polynucleotide comprising a first and a second nucleic acid, wherein said first nucleic acid is selected from the group consisting of:
[0057] a) a nucleic acid having a nucleic acid sequence as shown in any one of SEQ ID NOs: 436, 933, 939, 941, 947, 953, 955, 959, 965, 969, 973, 975, 977, 987, 985, 989 or 1006,
[0058] b) a nucleic acid encoding an amino acid sequence as shown in any one of SEQ ID NOs: 437, 934, 940, 942, 948, 954, 956, 960, 966, 970, 974, 976, 978, 988, 986, 990 or 1007; and
[0059] c) a nucleic acid being at least 70% identical to any of the nucleic acid of a) or b),
[0060] and wherein said second nucleic acid is selected from the group consisting of:
[0061] a) a nucleic acid having a nucleic acid sequence as shown in any one of SEQ ID NOs: 1, 939, 941, 947, 949, 957, 963, 969, 977, 983, 987, 991 or 1006,
[0062] b) a nucleic acid encoding an amino acid sequence as shown in any one of SEQ ID NOs: 2, 940, 942, 948, 950, 958, 964, 970, 978, 984, 988, 992 or 1007; and
[0063] c) a nucleic acid being at least 70% identical to any of the nucleic acid of a) or b).

[0064] The term “fusion polynucleotide” as used in accordance with the present invention relates to a polynucleotide which comprises more than one nucleic acid encoding different polypeptides. Preferably, the fusion polynucleotides of the present invention comprise two (i.e. a first and a second nucleic acid) or at least two different nucleic acids, preferably three, four, five, six, seven, eight, or nine different nucleic acids. The nucleic acids comprised by the fusion polynucleotide are, preferably, covalently linked to each other. Such a covalent linkage of the individual nucleic acids can be achieved, e.g., by ligation reactions. Alternatively, a fusion polynucleotide comprising the different nucleic acid parts may be obtained by chemical synthesis. More preferably, the polypeptides encoded by the polynucleotide of the present invention shall be capable of modulating the amount of seed storage compounds, preferably, fatty acids or lipids, when present in plant seeds in combination. The polypeptides encoded by the polynucleotide of the present invention are also referred to as lipid metabolism proteins (LMP) herein below. Suitable assays for measuring the activities mentioned before are described in the accompanying Examples.

[0065] Preferably, the fusion polynucleotide of the present invention upon expression in the seed of a transgenic plant is capable of significantly increasing the amount by weight of at least one seed storage compound. More preferably, such an increase as referred to in accordance with the present invention is an increase of the amount by weight of at least 1, 2.5, 5, 7.5, 10, 12.5, 15, 17.5, 20, 22.5 or 25% as compared to a control. Whether an increase is significant can be determined by statistical tests well known in the art including, e.g., Student's t-test. The percent increase rates of a seed storage compound are, preferably, determined compared to an empty vector control. An empty vector control is a transgenic plant, which has been transformed with the same vector or construct as a transgenic plant according to the present invention except for such a vector or construct is lacking the polynucleotide of the present invention. Alternatively, an untreated plant (i.e. a plant which has not been genetically manipulated) may be used as a control.

[0066] The nucleic acids comprised by the fusion polynucleotide include variants of the nucleic acids having the nucleic acid sequences shown in the specifically recited SEQ ID Nos (specific nucleic acids). However, the polypeptides encoded by such variant nucleic acids shall exhibit essentially the same biological activities as the polypeptides encoded by the specific nucleic acids or polypeptides referred to by specific SEQ ID Nos (specific polypeptides). Variant nucleic acids are, preferably, those which encode the specific polypeptides but which differ in the coding nucleic acid sequence due to the degenerated genetic code. Further variant nucleic acids are of the aforementioned specific nucleic acids are those representing orthologs, paralogs or other homologs of such nucleic acids.

[0067] The nucleic acid variants, preferably, also comprise nucleic acids having a nucleic acid sequence characterized in that the sequence can be derived from the aforementioned specific nucleic acid sequences by at least one nucleotide substitution, addition and/or deletion whereby the variant nucleic acid sequence shall still encode a polypeptide having a biological activity as specified above. Variants also encompass nucleic acids comprising a nucleic acid sequence which is capable of hybridizing to the aforementioned specific nucleic acid sequences, preferably, under stringent hybridization conditions. These stringent conditions are known to the skilled worker and can be found in Current Protocols in Molecular Biology, John Wiley & Sons, N.Y. (1989), 6.3.1-6.3.6. A preferred example for stringent hybridization conditions are hybridization conditions in 6× sodium chloride/sodium citrate (=SSC) at approximately 45° C., followed by one or more wash steps in 0.2×SSC, 0.1% SDS at 50 to 65° C. The skilled worker knows that these hybridization conditions differ depending on the type of nucleic acid and, for example when organic solvents are present, with regard to the temperature and concentration of the buffer. For example, under “standard hybridization conditions” the temperature differs depending on the type of nucleic acid between 42° C. and 58° C. in aqueous buffer with a concentration of 0.1 to 5×SSC (pH 7.2). If organic solvent is present in the abovementioned buffer, for example 50% formamide, the temperature under standard conditions is approximately 42° C. The hybridization conditions for DNA:DNA hybrids are, preferably, 0.1×SSC and 20° C. to 45° C., preferably between 30° C. and 45° C. The hybridization conditions for DNA:RNA hybrids are, preferably, 0.1×SSC and 30° C. to 55° C., preferably between 45° C. and 55° C. The abovementioned hybridization temperatures are determined for example for a nucleic acid with approximately 100 bp (=base pairs) in length and a G+C content of 50% in the absence of formamide. The skilled worker knows how to determine the hybridization conditions required by referring to textbooks such as the textbook mentioned above, or the following textbooks: Sambrook et al., “Molecular Cloning”, Cold Spring Harbor Laboratory, 1989; Hames and Higgins (Ed.) 1985, “Nucleic Acids Hybridization: A Practical Approach”, IRL Press at Oxford University Press, Oxford; Brown (Ed.) 1991, “Essential Molecular Biology: A Practical Approach”, IRL Press at Oxford University Press, Oxford. Alternatively, nucleic acid variants are obtainable by PCR-based techniques such as mixed oligonucleotide primer-based amplification of DNA, i.e. using degenerated primers against conserved domains of the polypeptides of the present invention. Conserved domains of the specific polypeptides of the present invention may be identified by a sequence comparison of the nucleic acid sequences or the amino acid sequences of the polypeptides of the present invention. Oligonucleotides suitable as PCR primers as well as suitable PCR conditions are described in the accompanying Examples. As a template, DNA or cDNA from bacteria, fungi, plants or animals may be used. Further, variants include nucleic acids comprising nucleic acid sequences which are at least 70%, at least 75%, at least 80%, at least 85%, at least 90%, at least 95%, at least 98% or at least 99% identical to the specific nucleic acid sequences of the fusion polynucleotide, wherein the polypeptides encoded by the polynucleotides retain the biological activities of the aforementioned specific polypeptides. Moreover, also encompassed are nucleic acids which comprise nucleic acid sequences encoding amino acid sequences which are at least 70%, at least 75%, at least 80%, at least 85%, at least 90%, at least 95%, at least 98% or at least 99% identical to the amino acid sequences of the specific polypeptides encoded by the fusion polynucleotide, wherein the polypeptides encoded by the variant amino acid sequences retain the biological activity of the aforementioned specific polypeptides The percent identity values are, preferably, calculated over the entire amino acid or nucleic acid sequence region. A series of programs based on a variety of algorithms is available to the skilled worker for comparing different sequences. In this context, the algorithms of Needleman and Wunsch or Smith and Waterman give particularly reliable results. To carry out the sequence alignments, the program PileUp (J. Mol. Evolution., 25, 351-360, 1987, Higgins et al., CABIOS, 5 1989: 151-153) or the programs Gap and BestFit (Needleman and Wunsch (J. Mol. Biol. 48; 443-453 (1970)) and Smith and Waterman (Adv. Appl. Math. 2; 482-489 (1981))), which are part of the GCG software packet [Genetics Computer Group, 575 Science Drive, Madison, Wis., USA 53711 (1991)], are to be used. The sequence identity values recited above in percent (%) are to be determined, preferably, using the program GAP over the entire sequence region with the following settings: Gap Weight: 50, Length Weight: 3, Average Match: 10.000 and Average Mismatch: 0.000, which, unless otherwise specified, shall always be used as standard settings for sequence alignments. For the purposes of the invention, the percent sequence identity between two nucleic acid or polypeptide sequences can be also determined using the Vector NTI 7.0 (PC) software package (InforMax, 7600 Wisconsin Ave., Bethesda, Md. 20814). A gap-opening penalty of 15 and a gap extension penalty of 6.66 are used for determining the percent identity of two nucleic acids. A gap-opening penalty of 10 and a gap extension penalty of 0.1 are used for determining the percent identity of two polypeptides. All other parameters are set at the default settings. For purposes of a multiple alignment (Clustal W algorithm), the gap-opening penalty is 10, and the gap extension penalty is 0.05 with blosum62 matrix. It is to be understood that for the purposes of determining sequence identity when comparing a DNA sequence to an RNA sequence, a thymidine nucleotide sequence is equivalent to an uracil nucleotide.

[0068] A nucleic acid comprising a fragment of any of the aforementioned nucleic acid sequences is also encompassed as a variant nucleic acid to be included into the fusion polynucleotide of the present invention. The fragment shall encode a polypeptide which still has a biological activity as specified above. Accordingly, the polypeptide may comprise or consist of the domains of the specific polypeptides conferring the said biological activity. A fragment as meant herein, preferably, comprises at least 20, at least 50, at least 100, at least 250 or at least 500 consecutive nucleotides of any one of the aforementioned nucleic acid sequences or encodes an amino acid sequence comprising at least 20, at least 30, at least 50, at least 80, at least 100 or at least 150 consecutive amino acids of any one of the aforementioned amino acid sequences.

[0069] The variant nucleic acids or fragments referred to above, preferably, encode polypeptides retaining at least 10%, at least 20%, at least 30%, at least 40%, at least 50%, at least 60%, at least 70%, at least 80% or at least 90% of the biological activity exhibited by the specific polypeptides of the fusion polynucleotide. The activity may be tested as described in the accompanying Examples.

[0070] The fusion polynucleotides of the present invention, preferably, contain further nucleic acids sequences as well. In addition to an open reading frame, further untranslated sequence at the 3′ and at the 5′ terminus of the coding gene region may be comprised, in particular, at least 500, preferably 200, more preferably 100 nucleotides of the sequence upstream of the 5′ terminus of the coding region and at least 100, preferably 50, more preferably 20 nucleotides of the sequence downstream of the 3′ terminus of the coding gene region. Furthermore, the nucleic acids of the present invention may encode fusion proteins wherein one partner of the fusion protein is a polypeptide being encoded by a nucleic acid sequence recited above. Such fusion proteins may comprise as additional part other enzymes of the fatty acid or lipid biosynthesis pathways, polypeptides for monitoring expression (e.g., green, yellow, blue or red fluorescent proteins, alkaline phosphatase and the like) or so called “tags” which may serve as a detectable marker or as an auxiliary measure for purification purposes. Tags for the different purposes are well known in the art and comprise FLAG-tags, 6-histidine-tags, MYC-tags and the like.

[0071] Variant nucleic acids as referred to in accordance with the present invention may be obtained by various natural as well as artificial sources. For example, nucleic acids may be obtained by in vitro and in vivo mutagenesis approaches using the above mentioned specific nucleic acids as a basis. Moreover, nucleic acids being homologs or orthologs may be obtained from various animal, plant, bacteria or fungus species. Paralogs may be identified from the species from which the specific sequences are derived.

[0072] The fusion polynucleotide of the present invention shall be provided, preferably, either as an isolated fusion polynucleotide (i.e. isolated from the natural context of the nucleic acids comprised by the fusion polynucleotide) or in genetically modified or exogenously (i.e. artificially) manipulated form. An isolated fusion polynucleotide can, for example, comprise less than approximately 5 kb, 4 kb, 3 kb, 2 kb, 1 kb, 0.5 kb or 0.1 kb of nucleotide sequences which naturally flank the nucleic acids comprised thereby in the genomic DNA of the cell from which the nucleic acids are derived. The fusion polynucleotide, preferably, is double or single stranded DNA including cDNA or RNA including antisense, micro- and siRNAs. The term encompasses single- as well as double-stranded polynucleotides. Moreover, comprised are also chemically modified fusion polynucleotides including naturally occurring modified polynucleotides such as glycosylated or methylated polynucleotides or artificial modified ones such as biotinylated polynucleotides.

[0073] The fusion polynucleotide comprising the nucleic acids have been, preferably, adapted to the specific codon-usage of the organism, e.g., the plant species, in which the fusion polynucleotide shall be expressed (i.e. the target organism). This is, in general, achieved by changing the codons of a nucleic acid sequence obtained from a first organism (i.e. the donor organism) encoding a given amino acid sequence into the codons normally used by the target organism whereby the amino acid sequence is retained. It is in principle acknowledged that the genetic code is redundant (i.e. degenerated). Specifically, 61 codons are used to encode only 20 amino acids. Thus, a majority of the 20 amino acids will be encoded by more than one codon. The codons for the amino acids are well known in the art and are universal to all organisms. However, among the different codons which may be used to encode a given amino acid, each organism may preferably use certain codons. The presence of rarely used codons in a nucleic acid sequence will result a depletion of the respective tRNA pools and, thereby, lower the translation efficiency. Thus, it may be advantageous to provide a fusion polynucleotide comprising a nucleic acid sequence encoding a polypeptide as referred to above wherein said nucleic acid sequence is optimized for expression in the target organism with respect to the codon usage. In order to optimize the codon usage for a target organism, a plurality of known genes from the said organism may be investigated for the most commonly used codons encoding the amino acids. In a subsequent step, the codons of a nuclei acid sequence from the donor organism will be optimized by replacing the codons in the donor sequence by the codons most commonly used by the target organism for encoding the same amino acids. It is to be understood that if the same codon is used preferably by both organisms, no replacement will be necessary. For various target organisms, tables with the preferred codon usages are already known in the art; see e.g., http://www.kazusa.or.jp/Kodon/E.html. Moreover, computer programs exist for the optimization, e.g., the Leto software, version 1.0 (Entelechon GmbH, Germany) or the GeneOptimizer (Geneart AG, Germany). For the optimization of a nucleic acid sequence, several criteria may be taken into account. For example, for a given amino acid, always the most commonly used codon may be selected for each codon to be exchanged. Alternatively, the codons used by the target organism may replace those in a donor sequence according to their naturally frequency. Accordingly, at some positions even less commonly used codons of the target organism will appear in the optimized nucleic acid sequence. The distribution of the different replacment codons of the target organism to the donor nucleic acid sequence may be randomly. Preferred target organisms in accordance with the present invention are soybean or canola (Brassica) species. Preferably, the fusion polynucleotide of the present invention or at least the nucleic acids comprised thereby have an optimized nucleic acid for codon usage in the envisaged target organism wherein at least 20%, at least 40%, at least 60%, at least 80% or all of the relevant codons are adapted.

[0074] It has been found in the studies underlying the present invention that the combinations of polypeptides referred to herein above are, advantageously, capable of modulating the amount of seed storage compounds in plants significantly. Thus, the fusion polynucleotides of the present invention are, in principle, useful for the synthesis of seed storage compounds such as fatty acids or lipids. Specifically, they may be used to generate transgenic plants or seeds thereof having a modified, preferably increased, amount of seed storage compounds. Such transgenic plants or seeds may be used for the manufacture of seed oil or other lipid and/or fatty acid containing compositions.

[0075] Preferably, the fusion polynucleotide, further comprises a third nucleic acid being selected from the group consisting of:
[0076] a) a nucleic acid having a nucleic acid sequence as shown in any one of SEQ ID NOs: 450, 933, 935, 937, 941, 945, 951, 959, 961, 969, 975, 977, 981, 989, 993 or 1006;
[0077] b) a nucleic acid encoding an amino acid sequence as shown in any one of SEQ ID NOs: 451, 934, 936, 938, 942, 946, 952, 960, 962, 970, 976, 978, 982, 990 or 1007; and
[0078] c) a nucleic acid being at least 70% identical to any of the nucleic acid of a) or b).

[0079] The present invention also contemplates a fusion polynucleotide wherein said first nucleic acid of the fusion polynucleotide is selected from the group consisting of:
[0080] a) a nucleic acid having a nucleic acid sequence as shown in SEQ ID NO: 943;
[0081] b) a nucleic acid encoding an amino acid sequence as shown in SEQ ID NOs: 944; and
[0082] c) a nucleic acid being at least 70% identical to the nucleic acid of a) or b),
[0083] wherein said second nucleic acid is selected from the group consisting of:
[0084] a) a nucleic acid having a nucleic acid sequence as shown in SEQ ID NO: 1022;
[0085] b) a nucleic acid encoding an amino acid sequence as shown in SEQ ID NOs: 1023; and
[0086] c) a nucleic acid being at least 70% identical to the nucleic acid of a) or b) and
[0087] wherein said polynucleotide further comprises a third nucleic acid selected from the group consisting of:
[0088] a) a nucleic acid having a nucleic acid sequence as shown in SEQ ID NO: 971;
[0089] b) a nucleic acid encoding an amino acid sequence as shown in SEQ ID NOs: 972; and
[0090] c) a nucleic acid being at least 70% identical to the nucleic acid of a) or b);
[0091] a fourth nucleic acid selected from the group consisting of:
[0092] a) a nucleic acid having a nucleic acid sequence as shown in SEQ ID NO: 1024;
[0093] b) a nucleic acid encoding an amino acid sequence as shown in SEQ ID NOs: 1025; and
[0094] c) a nucleic acid being at least 70% identical to the nucleic acid of a) or b);
[0095] a fifth nucleic acid selected from the group consisting of:
[0096] a) a nucleic acid having a nucleic acid sequence as shown in SEQ ID NO: 967;
[0097] b) a nucleic acid encoding an amino acid sequence as shown in SEQ ID NOs: 968; and
[0098] c) a nucleic acid being at least 70% identical to the nucleic acid of a) or b);
[0099] a sixth nucleic acid selected from the group consisting of:
[0100] a) a nucleic acid having a nucleic acid sequence as shown in SEQ ID NO: 1020;
[0101] b) a nucleic acid encoding an amino acid sequence as shown in SEQ ID NOs: 1021; and
[0102] c) a nucleic acid being at least 70% identical to the nucleic acid of a) or b);
[0103] a seventh nucleic acid is selected from the group consisting of:
[0104] a) a nucleic acid having a nucleic acid sequence as shown in SEQ ID NO: 1018;
[0105] b) a nucleic acid encoding an amino acid sequence as shown in SEQ ID NOs: 1019; and
[0106] c) a nucleic acid being at least 70% identical to the nucleic acid of a) or b);
[0107] a eigth nucleic acid selected from the group consisting of:
[0108] a) a nucleic acid having a nucleic acid sequence as shown in SEQ ID NO: 1016;
[0109] b) a nucleic acid encoding an amino acid sequence as shown in SEQ ID NOs: 1017; and
[0110] c) a nucleic acid being at least 70% identical to the nucleic acid of a) or b);
[0111] a ninth nucleic acid selected from the group consisting of:
[0112] a) a nucleic acid having a nucleic acid sequence as shown in SEQ ID NO: 979;
[0113] b) a nucleic acid encoding an amino acid sequence as shown in SEQ ID NOs: 980; and
[0114] c) a nucleic acid being at least 70% identical to the nucleic acid of a) or b).

[0115] The nucleic acids of the fusion polynucleotide are also, preferably, operatively linked to an expression control sequence. Suitable expression control sequences are referred to elsewhere in this specification and include promoters which allow for transcription in plants, preferably, in plant seeds. More preferably, a promoter to be used as an expression control sequence for a nucleic acid sequence comprised by the fusion polynucleotide of the invention is selected from the group consisting of: USP (SEQ ID NO: 1004), SBP1000 (SEQ ID NO: 1001), BnGLP (SEQ ID NO: 994), STPT (SEQ ID NO: 1003), LegB4 (SEQ ID NO: 997), LuPXR1727 (SEQ D NO. 999), Vicillin (SEQ ID NO: 1005), Napin A (SQ ID NO: 1000), LuPXR (SEQ ID NO: 998), Conlinin (SEQ ID NO: 996), pVfSBP (SEQ ID NO: 1002), Leb4 (SEQ ID NO: 997), pVfVic (SEQ ID NO: 1005) and Oleosin (SEQ ID NO: 995). It is to be understood that, more preferably, a first nucleic acid is driven by a first expression control sequence while a second nucleic acid comprised by the fusion polynucleotide is driven by a second expression control sequence being different from the said first expression control sequence. The same applies for the third and any further polypeptide encoding nucleic acid comprised by the fusion polynucleotides of the present invention. Table 3 shows particularly preferred combinations of expression control sequences and nucleic acids regulated thereby which are comprised by the fusion polynucleotides of the invention.

[0116] The nucleic acids of the fusion polynucleotide are also, preferably, operatively linked to a terminator sequence, i.e. a sequence which terminates transcription of RNA. Suitable terminator sequences are referred to elsewhere in this specification and include terminator sequences which allow for termination of transcription in plants, preferably, in plant seeds. More preferably, a terminator sequence for a nucleic acid sequence comprised by the fusion polynucleotide of the invention is selected from the group consisting of: tCaMV35S (SEQ ID NO: 1011), OCS (SEQ ID NO: 1014), AtGLP (SEQ ID NO: 1007), AtSACPD (SEQ ID NO: 1009), Leb3 (SEQ ID NO: 1013), CatpA (SEQ ID NO: 1012), t-AtPXR (SEQ ID NO: 1008), E9 (SEQ ID NO: 1015) and t-AtTIP (SEQ ID NO: 1010). It is to be understood that, more preferably, the transcription of a first nucleic acid is terminated by a first terminator sequence while the transcription of a second nucleic acid comprised by the fusion polynucleotide is terminated by a second terminator sequence being different from the said first terminator sequence. The same applies for the third and any further polypeptide encoding nucleic acid comprised by the fusion polynucleotides of the present invention. Table 3 shows particularly preferred combinations of terminator sequences and nucleic acids the transcription of which is terminated thereby and which are comprised by the fusion polynucleotides of the invention.

[0117] The present invention also relates to a vector comprising the aforementioned fusion polynucleotide. More preferably, said vector is an expression vector. The explanations of the terms given elsewhere in this specification, apply accordingly.

[0118] Moreover, the present invention relates to a host cell comprising the fusion polynucleotide or the aforementioned vector of the present invention. The explanations of the terms given elsewhere in this specification, apply accordingly.

[0119] It is to be understood that the polypeptides must not necessarily be encoded by a fusion polynucleotide as referred to herein above. Rather, in order to have a modulated seed storage compound content, it is sufficient that the polypeptide combinations referred to above are present in a host cell or a non-human organism comprising such a host cell. Accordingly, the present invention encompasses a host cell comprising a first and a second polypeptide, wherein said first polypeptide is encoded by a nucleic acid being selected from the group consisting of:
[0120] a) a nucleic acid having a nucleic acid sequence as shown in any one of SEQ ID NOs: 436, 933, 939, 941, 947, 953, 955, 959, 965, 969, 973, 975, 977, 987, 985, 989 or 1006,
[0121] b) a nucleic acid encoding an amino acid sequence as shown in any one of SEQ ID NOs: 437, 934, 940, 942, 948, 954, 956, 960, 966, 970, 974, 976, 978, 988, 986, 990 or 1007; and
[0122] c) a nucleic acid being at least 70% identical to any of the nucleic acid of a) or b),
[0123] and wherein said second polypeptide is encoded by a nucleic acid being selected from the group consisting of:
[0124] a) a nucleic acid having a nucleic acid sequence as shown in any one of SEQ ID NOs: 1, 939, 941, 947, 949, 957, 963, 969, 977, 983, 987, 991 or 1006,
[0125] b) a nucleic acid encoding an amino acid sequence as shown in any one of SEQ ID NOs: 2, 940, 942, 948, 950, 958, 964, 970, 978, 984, 988, 992 or 1007; and
[0126] c) a nucleic acid being at least 70% identical to any of the nucleic acid of a) or b).

[0127] More preferably, the said host cell further comprises a third polypeptide encoded by a nucleic acid being selected from the group consisting of:
[0128] a) a nucleic acid having a nucleic acid sequence as shown in any one of SEQ ID NOs: 450, 933, 935, 937, 941, 945, 951, 959, 961, 969, 975, 977, 981, 989 or 1006;
[0129] b) a nucleic acid encoding an amino acid sequence as shown in any one of SEQ ID NOs: 451, 934, 936, 938, 942, 946, 952, 960, 962, 970, 976, 978, 982, 990 or 1007; and
[0130] c) a nucleic acid being at least 70% identical to any of the nucleic acid of a) or b), or
[0131] which further comprises a transcript having a nucleic acid sequence as shown in SEQ ID NO: 993 or a nucleic acid sequence being at least 70% identical thereto.

[0132] The present invention also contemplates a host cell wherein said first polypeptide is encoded by a nucleic acid selected from the group consisting of:
[0133] a) a nucleic acid having a nucleic acid sequence as shown in SEQ ID NO: 943;
[0134] b) a nucleic acid encoding an amino acid sequence as shown in SEQ ID NOs: 944; and
[0135] c) a nucleic acid being at least 70% identical to the nucleic acid of a) or b),
[0136] wherein said second polypeptide is encoded by a nucleic acid is selected from the group consisting of:
[0137] a) a nucleic acid having a nucleic acid sequence as shown in SEQ ID NO: 1022;
[0138] b) a nucleic acid encoding an amino acid sequence as shown in SEQ ID NOs: 1023; and
[0139] c) a nucleic acid being at least 70% identical to the nucleic acid of a) or b) and
[0140] wherein said polynucleotide further comprises a third polypeptide being encoded by a nucleic acid selected from the group consisting of:
[0141] a) a nucleic acid having a nucleic acid sequence as shown in SEQ ID NO: 971;
[0142] b) a nucleic acid encoding an amino acid sequence as shown in SEQ ID NOs: 972; and
[0143] c) a nucleic acid being at least 70% identical to the nucleic acid of a) or b);
[0144] a fourth polypeptide being encoded by a nucleic acid selected from the group consisting of:
[0145] a) a nucleic acid having a nucleic acid sequence as shown in SEQ ID NO: 1024;
[0146] b) a nucleic acid encoding an amino acid sequence as shown in SEQ ID NOs: 1025; and
[0147] c) a nucleic acid being at least 70% identical to the nucleic acid of a) or b);
[0148] a fifth nucleic acid selected from the group consisting of:
[0149] a) a nucleic acid having a nucleic acid sequence as shown in SEQ ID NO: 967;
[0150] b) a nucleic acid encoding an amino acid sequence as shown in SEQ ID NOs: 968; and
[0151] c) a nucleic acid being at least 70% identical to the nucleic acid of a) or b);
[0152] a sixth polypeptide being encoded by a nucleic acid selected from the group consisting of:
[0153] a) a nucleic acid having a nucleic acid sequence as shown in SEQ ID NO: 1020;
[0154] b) a nucleic acid encoding an amino acid sequence as shown in SEQ ID NOs: 1021; and
[0155] c) a nucleic acid being at least 70% identical to the nucleic acid of a) or b);
[0156] a seventh polypeptide being encoded by a nucleic acid selected from the group consisting of:
[0157] a) a nucleic acid having a nucleic acid sequence as shown in SEQ ID NO: 1018;
[0158] b) a nucleic acid encoding an amino acid sequence as shown in SEQ ID NOs: 1019; and
[0159] c) a nucleic acid being at least 70% identical to the nucleic acid of a) or b);
[0160] a eigth polypeptide being encoded by a nucleic acid selected from the group consisting of:
[0161] a) a nucleic acid having a nucleic acid sequence as shown in SEQ ID NO: 1016;
[0162] b) a nucleic acid encoding an amino acid sequence as shown in SEQ ID NOs: 1017; and
[0163] c) a nucleic acid being at least 70% identical to the nucleic acid of a) or b);
[0164] a ninth polypeptide being encoded by a nucleic acid selected from the group consisting of:
[0165] a) a nucleic acid having a nucleic acid sequence as shown in SEQ ID NO: 979;
[0166] b) a nucleic acid encoding an amino acid sequence as shown in SEQ ID NOs: 980; and
[0167] c) a nucleic acid being at least 70% identical to the nucleic acid of a) or b).

[0168] The polypeptides may be encoded by separate polynucleotides comprising the nucleic acids encoding the aforementioned polypeptides. Such separate polynucleotides may be either transiently introduced into the host cell (e.g., by expression vectors) or permanently integrated into its genome (e.g., as an expression cassette). It will be understood that the separate polynucleotides preferably also comprise in addition to the nucleic acid to be expressed (i.e. the nucleic acid encoding the polypeptide of the required combination of polypeptides) suitable expression control and/or terminator sequences as referred to in the context of the fusion polynucleotides of the present invention. Such expression control and/or terminator sequences shall also be operatively linked to the nucleic acid comprised by the separate polynucleotide as to allow expression of the nucleic acid and/or termination of the transcription. Preferred combinations of expression control sequences, nucleic acids and terminators are those referred to in accordance with the fusion polynucleotides above (see Table 3).

[0169] The present invention also relates to a transgenic non-human organism comprising the fusion polynucleotide, the aforementioned vector or the aforementioned host cell of the present invention. More preferably, said non-human transgenic organism is a plant. The explanations of the terms given elsewhere in this specification, apply accordingly.

[0170] The present invention further relates to a method for the manufacture of a lipid or a fatty acids comprising the steps of:
[0171] (a) cultivating the aforementioned host cell or transgenic non-human organism under conditions allowing synthesis of the said lipid or fatty acid; and
[0172] (b) obtaining the said lipid or fatty acid from the host cell or the transgenic non-human organism.

[0173] The explanations of the terms given elsewhere in this specification, apply accordingly.

[0174] Furthermore, the present invention relates to a method for the manufacture of a plant having a modified amount of a seed storage compound comprising the steps of:
[0175] (a) introducing the fusion polynucleotide or the aforementioned vector of the present invention into a plant cell; and
[0176] (b) generating a transgenic plant from the said plant cell, wherein the polypeptides encoded by the fusion polynucleotide modifies the amount of the said seed storage compound in the transgenic plant.

[0177] More preferably, the amount of said seed storage compound is increased compared to a non-transgenic control plant. Most preferably, said seed storage compound is a lipid or a fatty acid. The explanations of the terms given elsewhere in this specification, apply accordingly.

[0178] The aforementioned method of the present invention may be also used to manufacture a plant having an altered total oil content in its seeds or a plant having an altered total seed oil content and altered levels of seed storage compounds in its seeds. Such plants are suitable sources for seed oil and may be used for the large scale manufacture thereof.

[0179] Further methods and uses of the aforementioned polynucleotides, vectors, host cells, organisms, methods and uses of the present invention will be described also below. Moreover, the terms used above will be explained in more detail.

[0180] The present invention further relates to combinations of polynucleotides encoding LMPs and order thereof within the combinations, resulting in coordinated presence of proteins associated with the metabolism of seed storage compounds in plants.

[0181] The present invention may be understood more readily by reference to the following detailed description of the preferred embodiments of the invention and the Examples included therein.

[0182] Before the present compounds, compositions, and methods are disclosed and described, it is to be understood that this invention is not limited to specific nucleic acids, specific polypeptides, specific cell types, specific host cells, specific conditions, or specific methods, etc., as such may, of course, vary, and the numerous modifications and variations therein will be apparent to those skilled in the art. It is also to be understood that the terminology used herein is for the purpose of describing particular embodiments only and is not intended to be limiting. As used in the specification and in the claims, “a” or “an” can mean one or more, depending upon the context in which it is used. Thus, for example, reference to “a cell” can mean that at least one cell can be utilized.

[0183] The term “transgenic” or “recombinant” when used in reference to a cell or an organism (e.g., with regard to a barley plant or plant cell) refers to a cell or organism which contains a transgene, or whose genome has been altered by the introduction of a transgene. A transgenic organism or tissue may comprise one or more transgenic cells. Preferably, the organism or tissue is substantially consisting of transgenic cells (i.e., more than 80%, preferably 90%, more preferably 95%, most preferably 99% of the cells in said organism or tissue are transgenic). The term “transgene” as used herein refers to any nucleic acid sequence, which is introduced into the genome of a cell or which has been manipulated by experimental manipulations by man. Preferably, said sequence is resulting in a genome which is different from a naturally occurring organism (e.g., said sequence, if endogenous to said organism, is introduced into a location different from its natural location, or its copy number is increased or decreased). A transgene may be an “endogenous DNA sequence”, “an “exogenous DNA sequence” (e.g., a foreign gene), or a “heterologous DNA sequence”. The term “endogenous DNA sequence” refers to a nucleotide sequence, which is naturally found in the cell into which it is introduced so long as it does not contain some modification (e.g., a point mutation, the presence of a selectable marker gene, etc.) relative to the naturally-occurring sequence.

[0184] The term “wild-type”, “natural” or of “natural origin” means with respect to an organism, polypeptide, or nucleic acid sequence, that said organism is naturally occurring or available in at least one naturally occurring organism which is not changed, mutated, or otherwise manipulated by man.

[0185] The terms “heterologous nucleic acid sequence” or “heterologous DNA” are used interchangeably to refer to a nucleotide sequence, which is ligated to, or is manipulated to become ligated to, a nucleic acid sequence to which it is not ligated in nature, or to which it is ligated at a different location in nature. Heterologous DNA is not endogenous to the cell into which it is introduced, but has been obtained from another cell. Generally, although not necessarily, such heterologous DNA encodes RNA and proteins that are not normally produced by the cell into which it is expressed. A promoter, transcription regulating sequence or other genetic element is considered to be “heterologous” in relation to another sequence (e.g., encoding a marker sequence or am agronomically relevant trait) if said two sequences are not combined or differently operably linked their natural environment. Preferably, said sequences are not operably linked in their natural environment (i.e. come from different genes). Most preferably, said regulatory sequence is covalently joined and adjacent to a nucleic acid to which it is not adjacent in its natural environment.

[0186] One aspect of the invention pertains to combinations of isolated nucleic acid molecules that encode LMP polypeptides or biologically active portions thereof, as well as nucleic acid fragments sufficient for use as hybridization probes or primers for the identification or amplification of an LMP-encoding nucleic acid (e.g., LMP DNA). As used herein, the term “nucleic acid molecule” is intended to include DNA molecules (e.g., cDNA or genomic DNA) and RNA molecules (e.g., mRNA) and analogs of the DNA or RNA generated using nucleotide analogs. This term also encompasses untranslated sequence located at both the 3′ and 5′ ends of the coding region of a gene: at least about 1000 nucleotides of sequence upstream from the 5′ end of the coding region and at least about 200 nucleotides of sequence downstream from the 3′ end of the coding region of the gene. The nucleic acid molecule can be single-stranded or double-stranded, but preferably is double-stranded DNA. An “isolated” nucleic acid molecule is one, which is substantially separated from other nucleic acid molecules, which are present in the natural source of the nucleic acid. Preferably, an “isolated” nucleic acid is substantially free of sequences that naturally flank the nucleic acid (i.e., sequences located at the 5′ and 3′ ends of the nucleic acid) in the genomic DNA of the organism, from which the nucleic acid is derived. For example, in various embodiments, the isolated LMP nucleic acid molecule can contain less than about 5 kb, 4 kb, 3 kb, 2 kb, 1 kb, 0.5 kb or 0.1 kb of nucleotide sequences, which naturally flank the nucleic acid molecule in genomic DNA of the cell from which the nucleic acid is derived. Moreover, an “isolated” nucleic acid molecule, such as a cDNA molecule, can be substantially free of other cellular material, or culture medium when produced by recombinant techniques, or chemical precursors or other chemicals when chemically synthesized. A nucleic acid molecule of the present invention (i.e. the polynucleotide or fusion polynucleotide of the invention), e.g., a nucleic acid molecule consisting of a combination of isolated nucleotide sequences of Table 3, or a portion thereof, can be constructed using standard molecular biology techniques and the sequence information provided herein. For example, an Arabidopsis thaliana, Helianthus annuus, Escherichia coli, Saccharomyces cerevisiae or Physcomitrella patens, Brassica napus, Glycine max or Linum usitatissimum LMP cDNA can be isolated from an Arabidopsis thaliana, Helianthus annuus, Escherichia coli, Saccharomyces cerevisiae or Physcomitrella patens, Brassica napus, Glycine max or Linum usitatissimum library using all or portion of one of the sequences of Table 3 as a hybridization probe and standard hybridization techniques (e.g., as described in Sambrook et al. 1989, Molecular Cloning: A Laboratory Manual. 2nd, ed., Cold Spring Harbor Laboratory, Cold Spring Harbor Laboratory Press, Cold Spring Harbor, N.Y.). Moreover, a nucleic acid molecule encompassing all or a portion of one of the sequences of Table 3 can be isolated by the polymerase chain reaction using oligonucleotide primers designed based upon this sequence (e.g., a nucleic acid molecule encompassing all or a portion of one of the sequences of Table 3 can be isolated by the polymerase chain reaction using oligonucleotide primers designed based upon this same sequence of Table 3). For example, mRNA can be isolated from plant cells (e.g., by the guanidinium-thiocyanate extraction procedure of Chirgwin et al. 1979, Biochemistry 18:5294-5299) and cDNA can be prepared using reverse transcriptase (e.g., Moloney MLV reverse transcriptase, available from Gibco/BRL, Bethesda, Md.; or AMV reverse transcriptase, available from Seikagaku America, Inc., St. Petersburg, Fla.). Synthetic oligonucleotide primers for polymerase chain reaction amplification can be designed based upon one of the nucleotide sequences shown in Table 3 and may contain restriction enzyme sites or sites for ligase independent cloning to construct the combinations described by this invention. A nucleic acid of the invention can be amplified using cDNA or, alternatively, genomic DNA, as a template and appropriate oligonucleotide primers according to standard PCR amplification techniques. The nucleic acids so amplified can be cloned into an appropriate vector in the combinations described by the present invention or variations thereof and characterized by DNA sequence analysis. Furthermore, oligonucleotides corresponding to an LMP nucleotide sequence can be prepared by standard synthetic techniques, e.g., using an automated DNA synthesizer.

[0187] In another preferred embodiment, an isolated nucleic acid molecule included in a combination of the invention comprises a nucleic acid molecule, which is a complement of one of the nucleotide sequences shown in Table 3, or a portion thereof. A nucleic acid molecule, which is complementary to one or more of the nucleotide sequences shown in Table 3, is one which is sufficiently complementary to one or more of the nucleotide sequences shown in Table 3, such that it can hybridize to one or more of the nucleotide sequences shown in Table 3, thereby forming a stable duplex.

[0188] In still another preferred embodiment, an isolated nucleic acid molecule in the combinations of the invention comprises a nucleotide sequence, which is at least about 50-60%, preferably at least about 60-70%, more preferably at least about 70-80%, 80-90%, or 90-95%, and even more preferably at least about 95%, 96%, 97%, 98%, 99% or more homologous to one or more nucleotide sequence shown in Table 3, or a portion thereof. In an additional preferred embodiment, an isolated nucleic acid molecule in the combinations of the invention comprises a nucleotide sequence which hybridizes, e.g., hybridizes under stringent conditions, to one or more of the nucleotide sequences shown in Table 3, or a portion thereof.

[0189] For the purposes of the invention hybridzation means preferably hybridization under conditions equivalent to hybridization in 7% sodium dodecyl sulfate (SDS), 0.5 M NaPO4, 1 mM EDTA at 50° C. with washing in 2×SSC, 0.1% SDS at 50° C., more desirably in 7% sodium dodecyl sulfate (SDS), 0.5 M NaPO4, 1 mM EDTA at 50° C. with washing in 1×SSC, 0.1% SDS at 50° C., more desirably still in 7% sodium dodecyl sulfate (SDS), 0.5 M NaPO4, 1 mM EDTA at 50° C. with washing in 0.5×SSC, 0.1% SDS at 50° C., preferably in 7% sodium dodecyl sulfate (SDS), 0.5 M NaPO4, 1 mM EDTA at 50° C. with washing in 0.1×SSC, 0.1% SDS at 50° C., more preferably in 7% sodium dodecyl sulfate (SDS), 0.5 M NaPO4, 1 mM EDTA at 50° C. with washing in 0.1×SSC, 0.1% SDS at 65° C. to a nucleic acid comprising 50 to 200 or more consecutive nucleotides.

[0190] A further preferred, non-limiting example of stringent hybridization conditions includes washing with a solution having a salt concentration of about 0.02 molar at pH 7 at about 60° C.

[0191] Moreover, the nucleic acid molecule in the combinations of the invention can comprise only a portion of the coding region of one of the sequences in Table 3, for example a fragment, which can be used as a probe or primer or a fragment encoding a biologically active portion of an LMP. The nucleotide sequences determined from the cloning of the LMP from Arabidopsis thaliana, Brassica napus, Helianthus annuus, Escherichia coli, Saccharomyces cerevisiae or Physcomitrella patens, allows for the generation of probes and primers designed for use in identifying and/or cloning LMP homologues in other cell types and organisms, as well as LMP homologues from other plants or related species. Therefore this invention also provides compounds comprising the combinations of nucleic acids disclosed herein, or fragments thereof. These compounds include the nucleic acid combinations attached to a moiety. These moieties include, but are not limited to, detection moieties, hybridization moieties, purification moieties, delivery moieties, reaction moieties, binding moieties, and the like. The probe/primer typically comprises substantially purified oligonucleotide. The oligonucleotide typically comprises a region of nucleotide sequence that hybridizes under stringent conditions to at least about 12, preferably about 25, more preferably about 40, 50, or 75 consecutive nucleotides of a sense strand of one of the sequences set forth in Table 3, an anti-sense sequence of one of the sequences set forth in Table 3, or naturally occurring mutants thereof. Primers based on a nucleotide sequence of Table 3 can be used in PCR reactions to clone LMP homologues for the combinations described by this inventions or variations thereof. Probes based on the LMP nucleotide sequences can be used to detect transcripts or genomic sequences encoding the same or homologous proteins. In preferred embodiments, the probe further comprises a label group attached thereto, e.g. the label group can be a radioisotope, a fluorescent compound, an enzyme, or an enzyme co-factor. Such probes can be used as a part of a genomic marker test kit for identifying cells which express an LMP, such as by measuring a level of an LMP-encoding nucleic acid in a sample of cells, e.g., detecting LMP mRNA levels, or determining whether a genomic LMP gene has been mutated or deleted.

[0192] In one embodiment, the nucleic acid molecule of the invention encodes a combination of proteins or portions thereof, which include amino acid sequences, which are sufficiently homologous to an amino acid encoded by a sequence of Table 3, such that the protein or portion thereof maintains the same or a similar function as the wild-type protein. As used herein, the language “sufficiently homologous” refers to proteins or portions thereof, which have amino acid sequences, which include a minimum number of identical or equivalent (e.g., an amino acid residue, which has a similar side chain as an amino acid residue in one of the ORFs of a sequence of Table 3) amino acid residues to an amino acid sequence, such that the protein or portion thereof is able to participate in the metabolism of compounds necessary for the production of seed storage compounds in plants, construction of cellular membranes in microorganisms or plants, or in the transport of molecules across these membranes. Examples of LMP-encoding nucleic acid sequences are set forth in Table 3.

[0193] As altered or increased sugar and/or fatty acid production is a general trait wished to be inherited into a wide variety of plants like maize, wheat, rye, oat, triticale, rice, barley, soybean, peanut, cotton, canola, manihot, pepper, sunflower, sugar beet, and tagetes, solanaceous plants like potato, tobacco, eggplant, and tomato, Vicia species, pea, alfalfa, bushy plants (coffee, cacao, tea), Salix species, trees (oil palm, coconut) and perennial grasses and forage crops, these crop plants are also preferred target plants for genetic engineering as one further embodiment of the present invention.

[0194] Portions of proteins encoded by the LMP nucleic acid molecules of the invention are preferably biologically active portions of one of the LMPs. As used herein, the term “biologically active portion of an LMP” is intended to include a portion, e.g., a domain/motif, of an LMP that participates in the metabolism of compounds necessary for the biosynthesis of seed storage lipids, or the construction of cellular membranes in microorganisms or plants, or in the transport of molecules across these membranes, or has an activity as set forth in Table 4. To determine whether an LMP or a biologically active portion thereof can participate in the metabolism of compounds necessary for the production of seed storage compounds and cellular membranes, an assay of enzymatic activity may be performed. Such assay methods are well known to those skilled in the art, and as described in Example 14 of the Exemplification.

[0195] Biologically active portions of an LMP include peptides comprising amino acid sequences derived from the amino acid sequence of an LMP (e.g., an amino acid sequence encoded by a nucleic acid of Table 3 or the amino acid sequence of a protein homologous to an LMP, which include fewer amino acids than a full length LMP or the full length protein which is homologous to an LMP) and exhibit at least one activity of an LMP. Typically, biologically active portions (peptides, e.g., peptides which are, for example, 5, 10, 15, 20, 30, 35, 36, 37, 38, 39, 40, 50, 100 or more amino acids in length) comprise a domain or motif with at least one activity of an LMP. Moreover, other biologically active portions, in which other regions of the protein are deleted, can be prepared by recombinant techniques and evaluated for one or more of the activities described herein. Preferably, the biologically active portions of an LMP include one or more selected domains/motifs or portions thereof having biological activity.

[0196] Additional nucleic acid fragments encoding biologically active portions of an LMP can be prepared by isolating a portion of one of the sequences, expressing the encoded portion of the LMP or peptide (e.g., by recombinant expression in vitro) and assessing the activity of the encoded portion of the LMP or peptide.

[0197] The invention further encompasses combinations of nucleic acid molecules that differ from one of the nucleotide sequences shown in Table 3 (and portions thereof) due to degeneracy of the genetic code and thus encode the same LMP as that encoded by the nucleotide sequences shown in Table 3. In a further embodiment, the combinations of nucleic acid molecule of the invention encode one or more full-length proteins, which are substantially homologous to an amino acid sequence of a polypeptide encoded by an open reading frame shown in Table 3. In one embodiment, the full-length nucleic acid or protein, or fragment of the nucleic acid or protein, is from Arabidopsis thaliana, Brassica napus, Helianthus annuus, Escherichia coli, Saccharomyces cerevisiae or Physcomitrella patens.

[0198] In addition to the Arabidopsis thaliana, Brassica napus, Helianthus annuus, Escherichia coli, Saccharomyces cerevisiae or Physcomitrella patens LMP nucleotide sequences shown in Table 3, it will be appreciated by those skilled in the art that DNA sequence polymorphisms that lead to changes in the amino acid sequences of LMPs may exist within a population Arabidopsis thaliana, Brassica napus, Helianthus annuus, Escherichia coli, Saccharomyces cerevisiae or Physcomitrella patens population). Such genetic polymorphism in the LMP gene may exist among individuals within a population due to natural variation. As used herein, the terms “gene” and “recombinant gene” refer to nucleic acid molecules comprising an open reading frame encoding an LMP, preferably an Arabidopsis thaliana, Brassica napus, Helianthus annuus, Escherichia coli, Saccharomyces cerevisiae or Physcomitrella patens LMP. Such natural variations can typically result in 1-40% variance in the nucleotide sequence of the LMP gene. Any and all such nucleotide variations and resulting amino acid polymorphisms in LMP that are the result of natural variation and that do not alter the functional activity of LMPs are intended to be within the scope of the invention.

[0199] The invention further encompasses combinations of nucleic acid molecules corresponding to natural variants and non-Arabidopsis thaliana, Brassica napus, Helianthus annuus, Escherichia coli, Saccharomyces cerevisiae or Physcomitrella patens orthologs of the Arabidopsis thaliana, Brassica napus, Helianthus annuus, Escherichia coli, Saccharomyces cerevisiae or Physcomitrella patens LMP nucleic acid sequence shown in Table 3. Nucleic acid molecules corresponding to natural variants and non-Arabidopsis thaliana, Brassica napus, Helianthus annuus, Escherichia coli, Saccharomyces cerevisiae or Physcomitrella patens orthologs of the Arabidopsis thaliana, Brassica napus, Helianthus annuus, Escherichia coli, Saccharomyces cerevisiae or Physcomitrella patens LMP cDNA described in Table 3 can be isolated based on their homology to Arabidopsis thaliana, Brassica napus, Helianthus annuus, Escherichia coli, Saccharomyces cerevisiae or Physcomitrella patens LMP nucleic acid shown in Table 3 using the Arabidopsis thaliana, Brassica napus, Helianthus annuus, Escherichia coli, Saccharomyces cerevisiae or Physcomitrella patens cDNA, or a portion thereof, as a hybridization probe according to standard hybridization techniques under stringent hybridization conditions. As used herein, the term “orthologs” refers to two nucleic acids from different species, but that have evolved from a common ancestral gene by speciation. Normally, orthologs encode proteins having the same or similar functions. Accordingly, in another embodiment, an isolated nucleic acid molecule is at least 15 nucleotides in length and hybridizes under stringent conditions to the nucleic acid molecule comprising a nucleotide sequence of Table 3. In other embodiments, the nucleic acid is at least 30, 50, 100, 250, or more nucleotides in length. As used herein, the term “hybridizes under stringent conditions” is intended to describe conditions for hybridization and washing, under which nucleotide sequences at least 60% homologous to each other typically remain hybridized to each other. Preferably, the conditions are such that sequences at least about 65%, more preferably at least about 70%, and even more preferably at least about 75% or more homologous to each other typically remain hybridized to each other. Such stringent conditions are known to those skilled in the art and can be found in Current Protocols in Molecular Biology, John Wiley & Sons, N.Y., 1989: 6.3.1-6.3.6. A preferred, non-limiting example of stringent hybridization conditions are hybridization in 6× sodium chloride/sodium citrate (SSC) at about 45° C., followed by one or more washes in 0.2×SSC, 0.1% SDS at 50-65° C. Preferably, an isolated nucleic acid molecule that hybridizes under stringent conditions to a sequence of Table 3 corresponds to a naturally occurring nucleic acid molecule. As used herein, a “naturally-occurring” nucleic acid molecule refers to an RNA or DNA molecule having a nucleotide sequence that occurs in nature (e.g., encodes a natural protein).

[0200] In addition to naturally-occurring variants of the LMP sequence that may exist in the population, the skilled artisan will further appreciate that changes can be introduced by mutation into a nucleotide sequence of Table 3, thereby leading to changes in the amino acid sequence of the encoded LMP, without altering the functional ability of the LMP. For example, nucleotide substitutions leading to amino acid substitutions at “non-essential” amino acid residues can be made in a sequence of Table 3. A “non-essential” amino acid residue is a residue that can be altered from the wild-type sequence of one of the LMPs (Table 3) without altering the activity of said LMP, whereas an “essential” amino acid residue is required for LMP activity. Other amino acid residues, however, (e.g., those that are not conserved or only semi-conserved in the domain having LMP activity) may not be essential for activity and thus are likely to be amenable to alteration without altering LMP activity.

[0201] Accordingly, another aspect of the invention pertains to nucleic acid molecules encoding LMPs that contain changes in amino acid residues that are not essential for LMP activity. Such LMPs differ in amino acid sequence from a sequence yet retain at least one of the LMP activities described herein. In one embodiment, the isolated nucleic acid molecule comprises a nucleotide sequence encoding a protein, wherein the protein comprises an amino acid sequence at least about 50% homologous to an amino acid sequence encoded by a nucleic acid of Table 3 and is capable of participation in the metabolism of compounds necessary for the production of seed storage compounds in Brassica napus, Glycine max or Linum usitatissimum, or cellular membranes, or has one or more activities set forth in Table 4. Preferably, the protein encoded by the nucleic acid molecule is at least about 50-60% homologous to one of the sequences encoded by a nucleic acid of Table 3, more preferably at least about 60-70% homologous to one of the sequences encoded by a nucleic acid of Table 3, even more preferably at least about 70-80%, 80-90%, 90-95% homologous to one of the sequences encoded by a nucleic acid of Table 3, and most preferably at least about 96%, 97%, 98%, or 99% homologous to one of the sequences encoded by a nucleic acid of Table 3.

[0202] To determine the percent homology of two amino acid sequences (e.g., one of the sequences encoded by a nucleic acid of Table 3 and a mutant form thereof), or of two nucleic acids, the sequences are aligned for optimal comparison purposes (e.g., gaps can be introduced in the sequence of one protein or nucleic acid for optimal alignment with the other protein or nucleic acid). The amino acid residues or nucleotides at corresponding amino acid positions or nucleotide positions are then compared. When a position in one sequence (e.g., one of the sequences encoded by a nucleic acid of Table 3) is occupied by the same amino acid residue or nucleotide as the corresponding position in the other sequence (e.g., a mutant form of the sequence selected from the polypeptide encoded by a nucleic acid of Table 3), then the molecules are homologous at that position (i.e., as used herein amino acid or nucleic acid “homology” is equivalent to amino acid or nucleic acid “identity”). The percent homology between the two sequences is a function of the number of identical positions shared by the sequences (i.e., % homology=numbers of identical positions/total numbers of positions×100). The sequence identity can be generally based on any one of the full length sequences of Table 3 as 100%.

[0203] For the purposes of the invention, the percent sequence identity between two nucleic acid or polypeptide sequences is determined using the Vector NTI 7.0 (PC) software package (InforMax, 7600 Wisconsin Ave., Bethesda, Md. 20814). A gap-opening penalty of 15 and a gap extension penalty of 6.66 are used for determining the percent identity of two nucleic acids. A gap-opening penalty of 10 and a gap extension penalty of 0.1 are used for determining the percent identity of two polypeptides. All other parameters are set at the default settings. For purposes of a multiple alignment (Clustal W algorithm), the gap-opening penalty is 10, and the gap extension penalty is 0.05 with blosum62 matrix. It is to be understood that for the purposes of determining sequence identity when comparing a DNA sequence to an RNA sequence, a thymidine nucleotide sequence is equivalent to an uracil nucleotide.

[0204] An isolated nucleic acid molecule encoding an LMP homologous to a protein sequence encoded by a nucleic acid of Table 3 can be created by introducing one or more nucleotide substitutions, additions or deletions into a nucleotide sequence of Table 3 such that one or more amino acid substitutions, additions or deletions are introduced into the encoded protein. Mutations can be introduced into one of the sequences of Table 3 by standard techniques, such as site-directed mutagenesis and PCR-mediated mutagenesis. Preferably, conservative amino acid substitutions are made at one or more predicted non-essential amino acid residues. A “conservative amino acid substitution” is one in which the amino acid residue is replaced with an amino acid residue having a similar side chain. Families of amino acid residues having similar side chains have been defined in the art. These families include amino acids with basic side chains (e.g., lysine, arginine, histidine), acidic side chains (e.g., aspartic acid, glutamic acid), uncharged polar side chains (e.g., glycine, asparagine, glutamine, serine, threonine, tyrosine, cysteine), nonpolar side chains (e.g., alanine, valine, leucine, isoleucine, proline, phenylalanine, methionine, tryptophan), beta-branched side chains (e.g., threonine, valine, isoleucine) and aromatic side chains (e.g., tyrosine, phenylalanine, tryptophan, histidine). Thus, a predicted non-essential amino acid residue in an LMP is preferably replaced with another amino acid residue from the same side chain family. Alternatively, in another embodiment, mutations can be introduced randomly along all or part of an LMP coding sequence, such as by saturation mutagenesis, and the resultant mutants can be screened for an LMP activity described herein to identify mutants that retain LMP activity. Following mutagenesis of one of the sequences of Table 3, the encoded protein can be expressed recombinantly, and the activity of the protein can be determined using, for example, assays described herein (see Examples 11-13 of the Exemplification).

[0205] Combinations of LMPs are preferably produced by recombinant DNA techniques. For example, one or more nucleic acid molecule encoding the protein is cloned into an expression vector (as described above), the expression vector is introduced into a host cell (as described herein), and the LMPs are expressed in the host cell. The LMPs can then be isolated from the cells by an appropriate purification scheme using standard protein purification techniques. Alternative to recombinant expression, one or more LMP or peptide thereof can be synthesized chemically using standard peptide synthesis techniques. Moreover, native LMPs can be isolated from cells, for example using an anti-LMP antibody, which can be produced by standard techniques utilizing an LMP or fragment thereof of this invention.

[0206] The invention also provides combinations of LMP chimeric or fusion proteins. As used herein, an LMP “chimeric protein” or “fusion protein” comprises an LMP polypeptide operatively linked to a non-LMP polypeptide. An “LMP polypeptide” refers to a polypeptide having an amino acid sequence corresponding to an LMP, whereas a “non-LMP polypeptide” refers to a polypeptide having an amino acid sequence corresponding to a protein which is not substantially homologous to the LMP, e.g., a protein which is different from the LMP, and which is derived from the same or a different organism. Within the fusion protein, the term “operatively linked” is intended to indicate that the LMP polypeptide and the non-LMP polypeptide are fused to each other so that both sequences fulfill the proposed function attributed to the sequence used. The non-LMP polypeptide can be fused to the N-terminus or C-terminus of the LMP polypeptide. For example, in one embodiment, the fusion protein is a GST-LMP (glutathione S-transferase) fusion protein in which the LMP sequences are fused to the C-terminus of the GST sequences. Such fusion proteins can facilitate the purification of recombinant LMPs. In another embodiment, the fusion protein is an LMP containing a heterologous signal sequence at its N-terminus. In certain host cells (e.g., mammalian host cells), expression and/or secretion of an LMP can be increased through use of a heterologous signal sequence.

[0207] Preferably, a combination of LMP chimeric or fusion proteins of the invention is produced by standard recombinant DNA techniques. For example, DNA fragments coding for the different polypeptide sequences are ligated together in-frame in accordance with conventional techniques, for example by employing blunt-ended or stagger-ended termini for ligation, restriction enzyme digestion to provide for appropriate termini, filling-in of cohesive ends as appropriate, alkaline phosphatase treatment to avoid undesirable joining, and enzymatic ligation. In another embodiment, the fusion gene can be synthesized by conventional techniques including automated DNA synthesizers. Alternatively, PCR amplification of gene fragments can be carried out using anchor primers that give rise to complementary overhangs between two consecutive gene fragments, which can subsequently be annealed and reamplified to generate a chimeric gene sequence (see, for example, Current Protocols in Molecular Biology, eds. Ausubel et al., John Wiley & Sons: 1992). Moreover, many expression vectors are commercially available that already encode a fusion moiety (e.g., a GST polypeptide). An LMP-encoding nucleic acid can be cloned into such an expression vector such that the fusion moiety is linked in-frame to the LMP.

[0208] In addition to the nucleic acid molecules encoding LMPs described above, another aspect of the invention pertains to combinations of isolated nucleic acid molecules that are antisense thereto. An “antisense” nucleic acid comprises a nucleotide sequence that is complementary to a “sense” nucleic acid encoding a protein, e.g., complementary to the coding strand of a double-stranded cDNA molecule or complementary to an mRNA sequence. Accordingly, an antisense nucleic acid can hydrogen bond to a sense nucleic acid. The antisense nucleic acid can be complementary to an entire LMP coding strand, or to only a portion thereof. In one embodiment, an antisense nucleic acid molecule is antisense to a “coding region” of the coding strand of a nucleotide sequence encoding an LMP. The term “coding region” refers to the region of the nucleotide sequence comprising codons that are translated into amino acid residues. In another embodiment, the antisense nucleic acid molecule is antisense to a “noncoding region” of the coding strand of a nucleotide sequence encoding LMP. The term “noncoding region” refers to 5′ and 3′ sequences that flank the coding region that are not translated into amino acids (i.e., also referred to as 5′ and 3′ untranslated regions).

[0209] Given the coding strand sequences encoding LMP disclosed herein (e.g., the sequences set forth in Table 3), combinations of antisense nucleic acids of the invention can be designed according to the rules of Watson and Crick base pairing. The antisense nucleic acid molecule can be complementary to the entire coding region of LMP mRNA, but more preferably is an oligonucleotide that is antisense to only a portion of the coding or noncoding region of LMP mRNA. For example, the antisense oligonucleotide can be complementary to the region surrounding the translation start site of LMP mRNA. An antisense oligonucleotide can be, for example, about 5, 10, 15, 20, 25, 30, 35, 40, 45, or 50 nucleotides in length. An antisense or sense nucleic acid of the invention can be constructed using chemical synthesis and enzymatic ligation reactions using procedures known in the art. For example, an antisense nucleic acid (e.g., an antisense oligonucleotide) can be chemically synthesized using naturally occurring nucleotides or variously modified nucleotides designed to increase the biological stability of the molecules or to increase the physical stability of the duplex formed between the antisense and sense nucleic acids, e.g., phosphorothioate derivatives and acridine substituted nucleotides can be used. Examples of modified nucleotides which can be used to generate the antisense nucleic acid include 5-fluorouracil, 5-bromouracil, 5-chlorouracil, 5-iodouracil, hypoxanthine, xanthine, 4-acetylcytosine, 5-(carboxyhydroxylmethyl)uracil, 5-carboxymethylamino-methyl-2-thiouridine, 5-carboxymethylaminomethyluracil, dihydro-uracil, beta-D-galactosylqueosine, inosine, N-6-isopentenyladenine, 1-methyl-guanine, 1-methylinosine, 2,2-dimethylguanine, 2-methyladenine, 2-methylguanine, 3-methylcytosine, 5-methyl-cytosine, N-6-adenine, 7-methylguanine, 5-methyl-aminomethyluracil, 5-methoxyamino-methyl-2-thiouracil, beta-D-mannosylqueosine, 5′-methoxycarboxymethyl-uracil, 5-methoxyuracil, 2-methylthio-N-6-isopentenyladenine, uracil-5-oxyacetic acid (v), wybutoxosine, pseudouracil, queosine, 2-thiocytosine, 5-methyl-2-thiouracil, 2-thiouracil, 4-thiouracil, 5-methyluracil, uracil-5-oxyacetic acid methylester, uracil-5-oxyacetic acid (v), 5-methyl-2-thiouracil, 3-(3-amino-3-N-2-carboxypropyl)uracil, (acp3)w, and 2,6-diamino-purine. Alternatively, the antisense nucleic acid can be produced biologically using an expression vector, into which a nucleic acid has been subcloned in an antisense orientation (i.e., RNA transcribed from the inserted nucleic acid will be of an antisense orientation to a target nucleic acid of interest, described further in the following subsection).

[0210] In another variation of the antisense technology, a double-strand, interfering, RNA construct can be used to cause a down-regulation of the LMP mRNA level and LMP activity in transgenic plants. This requires transforming the plants with a chimeric construct containing a portion of the LMP sequence in the sense orientation fused to the antisense sequence of the same portion of the LMP sequence. A DNA linker region of variable length can be used to separate the sense and antisense fragments of LMP sequences in the construct.

[0211] Combinations of the antisense nucleic acid molecules of the invention are typically administered to a cell or generated in situ, such that they hybridize with or bind to cellular mRNA and/or genomic DNA encoding an LMP to thereby inhibit expression of the protein, e.g., by inhibiting transcription and/or translation. The hybridization can be by conventional nucleotide complementarity to form a stable duplex, or, for example, in the case of an antisense nucleic acid molecule, which binds to DNA duplexes, through specific interactions in the major groove of the double helix. The antisense molecule can be modified such that it specifically binds to a receptor or an antigen expressed on a selected cell surface, e.g., by linking the antisense nucleic acid molecule to a peptide or an antibody, which binds to a cell surface receptor or antigen. The antisense nucleic acid molecule can also be delivered to cells using the vectors described herein. To achieve sufficient intracellular concentrations of the antisense molecules, vector constructs in which the antisense nucleic acid molecule is placed under the control of a strong prokaryotic, viral, or eukaryotic, including plant promoters are preferred.

[0212] In yet another embodiment, the combinations of antisense nucleic acid molecules of the invention are -anomeric nucleic acid molecules. An anomeric nucleic acid molecule forms specific double-stranded hybrids with complementary RNA, in which, contrary to the usual units, the strands run parallel to each other (Gaultier et al. 1987, Nucleic Acids Res. 15:6625-6641). The antisense nucleic acid molecule can also comprise a 2′-o-methyl-ribonucleotide (Inoue et al. 1987, Nucleic Acids Res. 15:6131-6148) or a chimeric RNA-DNA analogue (Inoue et al. 1987, FEBS Lett. 215:327-330).

[0213] In still another embodiment, a combination containing an antisense nucleic acid of the invention contains a ribozyme. Ribozymes are catalytic RNA molecules with ribonuclease activity, which are capable of cleaving a single-stranded nucleic acid, such as an mRNA, to which they have a complementary region. Thus, ribozymes (e.g., hammerhead ribozymes (described in Haselhoff & Gerlach 1988, Nature 334:585-591)) can be used to catalytically cleave LMP mRNA transcripts to thereby inhibit translation of LMP mRNA. A ribozyme having specificity for an LMP-encoding nucleic acid can be designed based upon the nucleotide sequence of an LMP cDNA disclosed herein or on the basis of a heterologous sequence to be isolated according to methods taught in this invention. For example, a derivative of a Tetrahymena L-19 IVS RNA can be constructed, in which the nucleotide sequence of the active site is complementary to the nucleotide sequence to be cleaved in an LMP-encoding mRNA (see, e.g., Cech et al., U.S. Pat. No. 4,987,071 and Cech et al., U.S. Pat. No. 5,116,742). Alternatively, LMP mRNA can be used to select a catalytic RNA having a specific ribonuclease activity from a pool of RNA molecules (see, e.g., Bartel, D. & Szostak J. W. 1993, Science 261:1411-1418).

[0214] Alternatively, LMP gene expression of one or more genes of the combinations of this invention can be inhibited by targeting nucleotide sequences complementary to the regulatory region of an LMP nucleotide sequence (e.g., an LMP promoter and/or enhancers) to form triple helical structures that prevent transcription of an LMP gene in target cells (See generally, Helene C. 1991, Anticancer Drug Des. 6:569-84; Helene C. et al. 1992, Ann. N.Y. Acad. Sci. 660:27-36; and Maher, L. J. 1992, Bioassays 14:807-15).

[0215] Another aspect of the invention pertains to vectors, preferably expression vectors, containing a combination of nucleic acids encoding LMPs (or a portion thereof). As used herein, the term “vector” refers to a nucleic acid molecule capable of transporting another nucleic acid, to which it has been linked. One type of vector is a “plasmid,” which refers to a circular double stranded DNA loop into which additional DNA segments can be ligated. Another type of vector is a viral vector, wherein additional DNA segments can be ligated into the viral genome. Certain vectors are capable of autonomous replication in a host cell, into which they are introduced (e.g., bacterial vectors having a bacterial origin of replication and episomal mammalian vectors). Other vectors (e.g., non-episomal mammalian vectors) are integrated into the genome of a host cell upon introduction into the host cell, and thereby are replicated along with the host genome. Moreover, certain vectors are capable of directing the expression of genes, to which they are operatively linked. Such vectors are referred to herein as “expression vectors.” In general, expression vectors of utility in recombinant DNA techniques are often in the form of plasmids. In the present specification, “plasmid,” and “vector” can be used inter-changeably as the plasmid is the most commonly used form of vector. However, the invention is intended to include such other forms of expression vectors, such as viral vectors (e.g., replication defective retroviruses, adenoviruses and adeno-associated viruses), which serve equivalent functions.

[0216] The recombinant expression vectors of the invention comprise a combination of nucleic acids of the invention in a form suitable for expression of the nucleic acid in a host cell, which means that the recombinant expression vectors include one or more regulatory sequences, selected on the basis of the host cells to be used for expression, which is operatively linked to the nucleic acid sequence to be expressed. Within a recombinant expression vector, “operably linked” is intended to mean that the nucleotide sequence of interest is linked to the regulatory sequence(s) in a manner which allows for expression of the nucleotide sequence and both sequences are fused to each other so that each fulfills its proposed function (e.g., in an in vitro transcription/translation system or in a host cell when the vector is introduced into the host cell). The term “regulatory sequence” is intended to include promoters, enhancers, and other expression control elements (e.g., polyadenylation signals). Such regulatory sequences are described, for example, in Goeddel; Gene Expression Technology: Methods in Enzymology 185, Academic Press, San Diego, Calif. (1990) or see: Gruber and Crosby, in: Methods in Plant Molecular Biology and Biotechnolgy, CRC Press, Boca Raton, Fla., eds.: Glick & Thompson, Chapter 7, 89-108 including the references therein. Regulatory sequences include those that direct constitutive expression of a nucleotide sequence in many types of host cell and those that direct expression of the nucleotide sequence only in certain host cells or under certain conditions. It will be appreciated by those skilled in the art that the design of the expression vector can depend on such factors as the choice of the host cell to be transformed, the level of expression of protein desired, etc. The expression vectors of the invention can be introduced into host cells to thereby produce proteins or peptides, including fusion proteins or peptides, encoded by nucleic acids as described herein (e.g., LMPs, mutant forms of LMPs, fusion proteins, etc.).

[0217] The recombinant expression vectors of the invention can be designed for expression of combinations of LMPs in prokaryotic or eukaryotic cells. For example, LMP genes can be expressed in bacterial cells, insect cells (using baculovirus expression vectors), yeast and other fungal cells (see Romanos M. A. et al. 1992, Foreign gene expression in yeast: a review, Yeast 8:423-488; van den Hondel, C. A. M. J. J. et al. 1991, Heterologous gene expression in filamentous fungi, in: More Gene Manipulations in Fungi, Bennet & Lasure, eds., p. 396-428: Academic Press: an Diego; and van den Hondel & Punt 1991, Gene transfer systems and vector development for filamentous fungi, in: Applied Molecular Genetics of Fungi, Peberdy et al., eds., p. 1-28, Cambridge University Press: Cambridge), algae (Falciatore et al. 1999, Marine Biotechnology 1:239-251), ciliates of the types: Holotrichia, Peritrichia, Spirotrichia, Suctoria, Tetrahymena, Paramecium, Colpidium, Glaucoma, Platyophrya, Potomacus, Pseudocohnilembus, Euplotes, Engelmaniella, and Stylonychia, especially of the genus Stylonychia lemnae with vectors following a transformation method as described in WO 98/01572 and multicellular plant cells (see Schmidt & Willmitzer 1988, High efficiency Agrobacterium tumefaciens-mediated transformation of Arabidopsis thaliana leaf and cotyledon plants, Plant Cell Rep.: 583-586); Plant Molecular Biology and Biotechnology, C Press, Boca Raton, Fla., chapter 6/7, S. 71-119 (1993); White, Jenes et al., Techniques for Gene Transfer, in: Transgenic Plants, Vol. 1, Engineering and Utilization, eds.: Kung and Wu, Academic Press 1993, 128-43; Potrykus 1991, Annu. Rev. Plant Physiol. Plant Mol. Biol. 42:205-225 (and references cited therein) or mammalian cells. Suitable host cells are discussed further in Goeddel, Gene Expression Technology: Methods in Enzymology 185, Academic Press, San Diego, Calif. 1990). Alternatively, the recombinant expression vector can be transcribed and translated in vitro, for example using T7 promoter regulatory sequences and T7 polymerase.

[0218] Expression of proteins in prokaryotes is most often carried out with vectors containing constitutive or inducible promoters directing the expression of either fusion or non-fusion proteins. Fusion vectors add a number of amino acids to a protein encoded therein, usually to the amino terminus of the recombinant protein but also to the C-terminus or fused within suitable regions in the proteins. Such fusion vectors typically serve one or more of the following purposes: 1) to increase expression of recombinant protein; 2) to increase the solubility of the recombinant protein; and 3) to aid in the purification of the recombinant protein by acting as a ligand in affinity purification. Often, in fusion expression vectors, a proteolytic cleavage site is introduced at the junction of the fusion moiety and the recombinant protein to enable separation of the recombinant protein from the fusion moiety subsequent to purification of the fusion protein. Such enzymes, and their cognate recognition sequences, include Factor Xa, thrombin, and enterokinase.

[0219] Typical fusion expression vectors include pGEX (Pharmacia Biotech Inc; Smith & Johnson 1988, Gene 67:31-40), pMAL (New England Biolabs, Beverly, Mass.) and pRIT5 (Pharmacia, Piscataway, N.J.), which fuse glutathione S-transferase (GST), maltose E binding protein, or protein A, respectively, to the target recombinant protein. In one embodiment, the coding sequence of the LMP is cloned into a pGEX expression vector to create a vector encoding a fusion protein comprising, from the N-terminus to the C-terminus, GST-thrombin cleavage site-X protein. The fusion protein can be purified by affinity chromatography using glutathione-agarose resin. Recombinant LMP unfused to GST can be recovered by cleavage of the fusion protein with thrombin.

[0220] Examples of suitable inducible non-fusion E. coli expression vectors include pTrc (Amann et al. 1988, Gene 69:301-315) and pET 11d (Studier et al. 1990, Gene Expression Technology: Methods in Enzymology 185, Academic Press, San Diego, Calif. 60-89). Target gene expression from the pTrc vector relies on host RNA polymerase transcription from a hybrid trp-lac fusion promoter. Target gene expression from the pET 11d vector relies on transcription from a T7 gn10-lac fusion promoter mediated by a coexpressed viral RNA polymerase (T7 gn1). This viral polymerase is supplied by host strains BL21 (DE3) or HMS174 (DE3) from a resident prophage harboring a T7 gn1 gene under the transcriptional control of the lacUV 5 promoter.

[0221] One strategy to maximize recombinant protein expression is to express the protein in a host bacteria with an impaired capacity to proteolytically cleave the recombinant protein (Gottesman S. 1990, Gene Expression Technology: Methods in Enzymology 185:119-128, Academic Press, San Diego, Calif.). Another strategy is to alter the nucleic acid sequence of the nucleic acid to be inserted into an expression vector so that the individual codons for each amino acid are those preferentially utilized in the bacterium chosen for expression (Wada et al. 1992, Nucleic Acids Res. 20:2111-2118). Such alteration of nucleic acid sequences of the invention can be carried out by standard DNA synthesis techniques.

[0222] In another embodiment, the LMP combination expression vector is a yeast expression vector. Examples of vectors for expression in yeast S. cerevisiae include pYepSec1 (Baldari et al. 1987, Embo J. 6:229-234), pMFa (Kurjan & Herskowitz 1982, Cell 30:933-943), pJRY88 (Schultz et al. 1987, Gene 54:113-123), and pYES2 (Invitrogen Corporation, San Diego, Calif.). Vectors and methods for the construction of vectors appropriate for use in other fungi, such as the filamentous fungi, include those detailed in: van den Hondel & Punt 1991, “Gene transfer systems and vector development for filamentous fungi,” in: Applied Molecular Genetics of Fungi, Peberdy et al., eds., p. 1-28, Cambridge University Press: Cambridge.

[0223] Alternatively, the combinations of LMPs of the invention can be expressed in insect cells using baculovirus expression vectors. Baculovirus vectors available for expression of proteins in cultured insect cells (e.g., Sf 9 cells) include the pAc series (Smith et al. 1983, Mol. Cell Biol. 3:2156-2165) and the pVL series (Lucklow & Summers 1989, Virology 170:31-39).

[0224] In yet another embodiment, a combination of nucleic acids of the invention is expressed in mammalian cells using a mammalian expression vector. Examples of mammalian expression vectors include pCDM8 (Seed 1987, Nature 329:840) and pMT2PC (Kaufman et al. 1987, EMBO J. 6:187-195). When used in mammalian cells, the expression vector's control functions are often provided by viral regulatory elements. For example, commonly used promoters are derived from polyoma, Adenovirus 2, cytomegalovirus, and Simian Virus 40. For other suitable expression systems for both prokaryotic and eukaryotic cells see chapters 16 and 17 of Sambrook, Fritsh and Maniatis, Molecular Cloning: A Laboratory Manual. 2nd, ed., Cold Spring Harbor Laboratory, Cold Spring Harbor Laboratory Press, Cold Spring Harbor, N.Y., 1989.

[0225] In another embodiment, a combination of the LMPs of the invention may be expressed in unicellular plant cells (such as algae, see Falciatore et al. (1999, Marine Biotechnology 1:239-251 and references therein) and plant cells from higher plants (e.g., the spermatophytes, such as crop plants). Examples of plant expression vectors include those detailed in: Becker, Kemper, Schell and Masterson (1992, “New plant binary vectors with selectable markers located proximal to the left border,” Plant Mol. Biol. 20:1195-1197) and Bevan (1984, “Binary Agrobacterium vectors for plant transformation,” Nucleic Acids Res. 12:8711-8721; Vectors for Gene Transfer in Higher Plants; in: Transgenic Plants, Vol. 1, Engineering and Utilization, eds.: Kung and R. Wu, Academic Press, 1993, S. 15-38).

[0226] A plant expression cassette preferably contains regulatory sequences capable to drive gene expression in plant cells, and which are operably linked so that each sequence can fulfill its function such as termination of transcription, including polyadenylation signals. Preferred polyadenylation signals are those originating from Agrobacterium tumefaciens t-DNA such as the gene 3 known as octopine synthase of the Ti-plasmid pTiACH5 (Gielen et al. 1984, EMBO J. 3:835) or functional equivalents thereof. But also all other terminators functionally active in plants are suitable.

[0227] As plant gene expression is very often not limited on transcriptional levels a plant expression cassette preferably contains other operably-linked sequences, like translational enhancers such as the overdrive-sequence containing the 5″-untranslated leader sequence from tobacco mosaic virus enhancing the protein per RNA ratio (Gallie et al. 1987, Nucleic Acids Res. 15:8693-8711).

[0228] Plant gene expression has to be operably linked to an appropriate promoter conferring gene expression in a timely, cell or tissue specific manner. Preferred are promoters driving constitutive expression (Benfey et al. 1989, EMBO J. 8:2195-2202) like those derived from plant viruses like the 35S CAMV (Franck et al. 1980, Cell 21:285-294), the 19S CaMV (see also U.S. Pat. No. 5,352,605 and WO 84/02913) or the ptxA promoter (Bown, D. P. PhD thesis (1992) Department of Biological Sciences, University of Durham, Durham, U.K) or plant promoters like those from Rubisco small subunit described in U.S. Pat. No. 4,962,028. Even more preferred are seed-specific promoters driving expression of LMP proteins during all or selected stages of seed development. Seed-specific plant promoters are known to those of ordinary skill in the art and are identified and characterized using seed-specific mRNA libraries and expression profiling techniques. Seed-specific promoters include the napin-gene promoter from rapeseed (U.S. Pat. No. 5,608,152), the USP-promoter from Vicia faba (Baeumlein et al. 1991, Mol. Gen. Genetics 225:459-67), the oleosin-promoter from Arabidopsis (WO 98/45461), the phaseolin-promoter from Phaseolus vulgaris (U.S. Pat. No. 5,504,200), the Bce4-promoter from Brassica (WO9113980) or the legumin B4 promoter (LeB4; Baeumlein et al. 1992, Plant J. 2:233-239), as well as promoters conferring seed specific expression in monocot plants like maize, barley, wheat, rye, rice etc. Suitable promoters to note are the lpt2 or lpt1-gene promoter from barley (WO 95/15389 and WO 95/23230) or those described in WO 99/16890 (promoters from the barley hordein-gene, the rice glutelin gene, the rice oryzin gene, the rice prolamin gene, the wheat gliadin gene, wheat glutelin gene, the maize zein gene, the oat glutelin gene, the Sorghum kasirin-gene, and the rye secalin gene).

[0229] Plant gene expression can also be facilitated via an inducible promoter (for a review see Gatz 1997, Annu. Rev. Plant Physiol. Plant Mol. Biol. 48:89-108). Chemically inducible promoters are especially suitable if gene expression is desired in a time specific manner. Examples for such promoters are a salicylic acid inducible promoter (WO 95/19443), a tetracycline inducible promoter (Gatz et al. 1992, Plant J. 2:397-404) and an ethanol inducible promoter (WO 93/21334).

[0230] Promoters responding to biotic or abiotic stress conditions are also suitable promoters such as the pathogen inducible PRP1-gene promoter (Ward et al., 1993, Plant Mol. Biol. 22:361-366), the heat inducible hsp80-promoter from tomato (U.S. Pat. No. 5,187,267), cold inducible alpha-amylase promoter from potato (WO 96/12814) or the wound-inducible pinII-promoter (EP 375091).

[0231] Other preferred sequences for use in plant gene expression cassettes are targeting-sequences necessary to direct the gene-product in its appropriate cell compartment (for review see Kermode 1996, Crit. Rev. Plant Sci. 15:285-423 and references cited therein) such as the vacuole, the nucleus, all types of plastids like amyloplasts, chloroplasts, chromoplasts, the extracellular space, mitochondria, the endoplasmic reticulum, oil bodies, peroxisomes, and other compartments of plant cells. Also especially suited are promoters that confer plastid-specific gene expression, as plastids are the compartment where precursors and some end products of lipid biosynthesis are synthesized. Suitable promoters such as the viral RNA-polymerase promoter are described in WO 95/16783 and WO 97/06250 and the clpP-promoter from Arabidopsis described in WO 99/46394.

[0232] The invention further provides a recombinant expression vector comprising a combination of DNA molecules of the invention cloned into the expression vector in an antisense orientation. That is, the DNA molecule is operatively linked to a regulatory sequence in a manner that allows for expression (by transcription of the DNA molecule) of an RNA molecule that is antisense to LMP mRNA. Regulatory sequences operatively linked to a nucleic acid cloned in the antisense orientation can be chosen which direct the continuous expression of the antisense RNA molecule in a variety of cell types, for instance viral promoters and/or enhancers, or regulatory sequences can be chosen which direct constitutive, tissue specific or cell type specific expression of antisense RNA. The antisense expression vector can be in the form of a recombinant plasmid, phagemid or attenuated virus, in which antisense nucleic acids are produced under the control of a high efficiency regulatory region, the activity of which can be determined by the cell type, into which the vector is introduced. For a discussion of the regulation of gene expression using antisense genes see Weintraub et al. (1986, Antisense RNA as a molecular tool for genetic analysis, Reviews—Trends in Genetics, Vol. 1) and Mol et al. (1990, FEBS Lett. 268:427-430).

[0233] Another aspect of the invention pertains to host cells into which a recombinant expression vector of the invention has been introduced. The terms “host cell” and “recombinant host cell” are used interchangeably herein. It is to be understood that such terms refer not only to the particular subject cell but also to the progeny or potential progeny of such a cell. Because certain modifications may occur in succeeding generations due to either mutation or environmental influences, such progeny may not, in fact, be identical to the parent cell, but are still included within the scope of the term as used herein. A host cell can be any prokaryotic or eukaryotic cell. For example, a combination of LMPs can be expressed in bacterial cells, insect cells, fungal cells, mammalian cells (such as Chinese hamster ovary cells (CHO) or COS cells), algae, ciliates, or plant cells. Other suitable host cells are known to those skilled in the art.

[0234] Vector DNA can be introduced into prokaryotic or eukaryotic cells via conventional transformation or transfection techniques. As used herein, the terms “transformation” and “transfection,” “conjugation,” and “transduction” are intended to refer to a variety of art-recognized techniques for introducing foreign nucleic acid (e.g., DNA) into a host cell, including calcium phosphate or calcium chloride co-precipitation, DEAE-dextran-mediated transfection, lipofection, natural competence, chemical-mediated transfer, or electroporation. Suitable methods for transforming or transfecting host cells including plant cells can be found in Sambrook et al. (1989, Molecular Cloning: A Laboratory Manual. 2nd, ed., Cold Spring Harbor Laboratory, Cold Spring Harbor Laboratory Press, Cold Spring Harbor, N.Y.) and other laboratory manuals such as Methods in Molecular Biology 1995, Vol. 44, Agrobacterium protocols, ed: Gartland and Davey, Humana Press, Totowa, N.J. For stable transfection of mammalian and plant cells, it is known that, depending upon the expression vector and transfection technique used, only a small fraction of cells may integrate the foreign DNA into their genome. In order to identify and select these integrants, a gene that encodes a selectable marker (e.g., resistance to antibiotics) is generally introduced into the host cells along with the gene of interest. Preferred selectable markers include those that confer resistance to drugs, such as G418, hygromycin, kanamycin, and methotrexate or in plants that confer resistance towards an herbicide, such as glyphosate or glufosinate. A nucleic acid encoding a selectable marker can be introduced into a host cell on the same vector as that encoding a combination of LMPs or can be introduced on a separate vector. Cells stably transfected with the introduced nucleic acid can be identified by, for example, drug selection (e.g., cells that have incorporated the selectable marker gene will survive, while the other cells die).

[0235] To create a homologous recombinant microorganism, a vector is prepared that contains a combination of at least a portion of an LMP gene, into which a deletion, addition or substitution has been introduced to thereby alter, e.g., functionally disrupt, the LMP gene. Preferably, this LMP gene is an Arabidopsis thaliana, Brassica napus, Helianthus annuus, Escherichia coli, Saccharomyces cerevisiae or Physcomitrella patens LMP gene, but it can be a homologue from a related plant or even from a mammalian, yeast, or insect source. In a preferred embodiment, the vector is designed such that, upon homologous recombination, the endogenous LMP gene is functionally disrupted (i.e., no longer encodes a functional protein; also referred to as a knock-out vector). Alternatively, the vector can be designed such that, upon homologous recombination, the endogenous LMP gene is mutated or otherwise altered but still encodes functional protein (e.g., the upstream regulatory region can be altered to thereby alter the expression of the endogenous LMP). To create a point mutation via homologous recombination, DNA-RNA hybrids can be used in a technique known as chimeraplasty (Cole-Strauss et al. 1999, Nucleic Acids Res. 27:1323-1330 and Kmiec 1999, American Scientist 87:240-247). Homologous recombination procedures in Arabidopsis thaliana or other crops are also well known in the art and are contemplated for use herein.

[0236] In a homologous recombination vector, within the combination of genes coding for LMPs shown in Table 3 the altered portion of the LMP gene is flanked at its 5′ and 3′ ends by additional nucleic acid of the LMP gene to allow for homologous recombination to occur between the exogenous LMP gene carried by the vector and an endogenous LMP gene in a microorganism or plant. The additional flanking LMP nucleic acid is of sufficient length for successful homologous recombination with the endogenous gene. Typically, several hundreds of base pairs up to kilobases of flanking DNA (both at the 5′ and 3′ ends) are included in the vector (see e.g., Thomas & Capecchi 1987, Cell 51:503, for a description of homologous recombination vectors). The vector is introduced into a microorganism or plant cell (e.g., via polyethyleneglycol mediated DNA). Cells in which the introduced LMP gene has homologously recombined with the endogenous LMP gene are selected using art-known techniques.

[0237] In another embodiment, recombinant microorganisms can be produced which contain selected systems, which allow for regulated expression of the introduced combinations of genes. For example, inclusion of a combination of one two or more LMP genes on a vector placing it under control of the lac operon permits expression of the LMP gene only in the presence of IPTG. Such regulatory systems are well known in the art.

[0238] A host cell of the invention, such as a prokaryotic or eukaryotic host cell in culture can be used to produce (i.e., express) a combination of LMPs. Accordingly, the invention further provides methods for producing LMPs using the host cells of the invention. In one embodiment, the method comprises culturing a host cell of the invention (into which a recombinant expression vector encoding a combination of LMPs has been introduced, or which contains a wild-type or altered LMP gene in it's genome) in a suitable medium until the combination of LMPs is produced.

[0239] An isolated LMP or a portion thereof of the invention can participate in the metabolism of compounds necessary for the production of seed storage compounds in plants such as Brassica napus, Glycine max or Linum usitatissimum or of cellular membranes, or has one or more of the activities set forth in Table 4. In preferred embodiments, the protein or portion thereof comprises an amino acid sequence which is sufficiently homologous to an amino acid sequence encoded by a nucleic acid of Table 3 such that the protein or portion thereof maintains the ability to participate in the metabolism of compounds necessary for the construction of cellular membranes in plants such as Brassica napus, Glycine max or Linum usitatissimum, or in the transport of molecules across these membranes. The portion of the protein is preferably a biologically active portion as described herein. In another preferred embodiment, an LMP of the invention has an amino acid sequence encoded by a nucleic acid of Table 3. In yet another preferred embodiment, the LMP has an amino acid sequence which is encoded by a nucleotide sequence which hybridizes, e.g., hybridizes under stringent conditions, to a nucleotide sequence of Table 3. In still another preferred embodiment, the LMP has an amino acid sequence which is encoded by a nucleotide sequence that is at least about 50-60%, preferably at least about 60-70%, more preferably at least about 70-80%, 80-90%, 90-95%, and even more preferably at least about 96%, 97%, 98%, 99%, or more homologous to one of the amino acid sequences encoded by a nucleic acid of Table 3. The preferred LMPs of the present invention also preferably possess at least one of the LMP activities described herein. For example, a preferred LMP of the present invention includes an amino acid sequence encoded by a nucleotide sequence which hybridizes, e.g., hybridizes under stringent conditions, to a nucleotide sequence of Table 3, and which can participate in the metabolism of compounds necessary for the construction of cellular membranes in plants such as Brassica napus, Glycine max or Linum usitatissimum, or in the transport of molecules across these membranes, or which has one or more of the activities set forth in Table 4.

[0240] In other embodiments, the combination of LMPs is substantially homologous to a combination of amino acid sequences encoded by nucleic acids of Table 3 and retain the functional activity of the protein of one of the sequences encoded by a nucleic acid of Table 3 yet differs in amino acid sequence due to natural variation or mutagenesis, as described in detail above. Accordingly the LMP is a protein which comprises an amino acid sequence which is at least about 50-60%, preferably at least about 60-70%, and more preferably at least about 70-80, 80-90, 90-95%, and most preferably at least about 96%, 97%, 98%, 99%, or more homologous to an entire amino acid sequence and which has at least one of the LMP activities described herein. In another embodiment, the invention pertains to a full Arabidopsis thaliana, Helianthus annuus, Escherichia coli, Saccharomyces cerevisiae or Physcomitrella patens, Brassica napus, Glycine max or Linum usitatissimum protein which is substantially homologous to an entire amino acid sequence encoded by a nucleic acid of Table 3.

[0241] Dominant negative mutations or trans-dominant suppression can be used to reduce the activity of an LMP in transgenics seeds in order to change the levels of seed storage compounds. To achieve this, a mutation that abolishes the activity of the LMP is created and the inactive non-functional LMP gene is overexpressed as part of the combination of this invention in the transgenic plant. The inactive trans-dominant LMP protein competes with the active endogenous LMP protein for substrate or interactions with other proteins and dilutes out the activity of the active LMP. In this way the biological activity of the LMP is reduced without actually modifying the expression of the endogenous LMP gene. This strategy was used by Pontier et al to modulate the activity of plant transcription factors (Pontier D, Miao Z H, Lam E, Plant J 2001 Sep. 27(6): 529-38, Trans-dominant suppression of plant TGA factors reveals their negative and positive roles in plant defense responses).

[0242] Homologues of the LMP can be generated for combinations by mutagenesis, e.g., discrete point mutation or truncation of the LMP. As used herein, the term “homologue” refers to a variant form of the LMP that acts as an agonist or antagonist of the activity of the LMP. An agonist of the LMP can retain substantially the same, or a subset, of the biological activities of the LMP. An antagonist of the LMP can inhibit one or more of the activities of the naturally-occurring form of the LMP, by, for example, competitively binding to a down-stream or upstream member of the cell membrane component metabolic cascade, which includes the LMP, or by binding to an LMP, which mediates transport of compounds across such membranes, thereby preventing translocation from taking place.

[0243] In addition, libraries of fragments of the LMP coding sequences can be used to generate a variegated population of LMP fragments for screening and subsequent selection of homologues of an LMP to be included in combinations as described in table 3. In one embodiment, a library of coding sequence fragments can be generated by treating a double stranded PCR fragment of an LMP coding sequence with a nuclease under conditions, wherein nicking occurs only about once per molecule, denaturing the double stranded DNA, renaturing the DNA to form double stranded DNA, which can include sense/antisense pairs from different nicked products, removing single stranded portions from reformed duplexes by treatment with S1 nuclease, and ligating the resulting fragment library into an expression vector. By this method, an expression library can be derived, which encodes N-terminal, C-terminal and internal fragments of various sizes of the LMP. Several techniques are known in the art for screening gene products of combinatorial libraries made by point mutations or truncation, and for screening cDNA libraries for gene products having a selected property. Such techniques are adaptable for rapid screening of the gene libraries generated by the combinatorial mutagenesis of LMP homologues. The most widely used techniques, which are amenable to high through-put analysis, for screening large gene libraries typically include cloning the gene library into replicable expression vectors, transforming appropriate cells with the resulting library of vectors, and expressing the combinatorial genes under conditions in which detection of a desired activity facilitates isolation of the vector encoding the gene whose product was detected. Recursive ensemble mutagenesis (REM), a new technique that enhances the frequency of functional mutants in the libraries, can be used in combination with the screening assays to identify LMP homologues (Arkin & Yourvan 1992, Proc. Natl. Acad. Sci. USA 89:7811-7815; Delgrave et al. 1993, Protein Engineering 6:327-331).

[0244] In another embodiment, cell based assays can be exploited to analyze a variegated LMP library, using methods well known in the art.

[0245] The nucleic acid molecules, proteins, protein homologues and fusion proteins for the combinations described herein, and vectors, and host cells described herein can be used in one or more of the following methods: identification of Arabidopsis thaliana, Brassica napus, Helianthus annuus, Escherichia coli, Saccharomyces cerevisiae or Physcomitrella patens and related organisms; mapping of genomes of organisms related to Arabidopsis thaliana, Brassica napus, Helianthus annuus, Escherichia coli, Saccharomyces cerevisiae or Physcomitrella patens; identification and localization of Arabidopsis thaliana, Brassica napus, Helianthus annuus, Escherichia coli, Saccharomyces cerevisiae or Physcomitrella patens sequences of interest; evolutionary studies; determination of LMP regions required for function; modulation of an LMP activity; modulation of the metabolism of one or more cell functions; modulation of the transmembrane transport of one or more compounds; and modulation of seed storage compound accumulation.

[0246] The plant Arabidopsis thaliana represents one member of higher (or seed) plants. It is related to other plants such as Brassica napus, Glycine max or Linum usitatissimum which require light to drive photosynthesis and growth. Plants like Arabidopsis thaliana, Brassica napus, Glycine max or Linum usitatissimum share a high degree of homology on the DNA sequence and polypeptide level, allowing the use of heterologous screening of DNA molecules with probes evolving from other plants or organisms, thus enabling the derivation of a consensus sequence suitable for heterologous screening or functional annotation and prediction of gene functions in third species, isolation of the corresponding genes and use of the later in combinations described for the sequences listed in Table 3.

[0247] There are a number of mechanisms by which the alteration of a combination of LMPs of the invention may directly affect the accumulation and/or composition of seed storage compounds. In the case of plants expressing a combination of LMPs, increased transport can lead to altered accumulation of compounds, which ultimately could be used to affect the accumulation of one or more seed storage compounds during seed development. Expression of single genes affecting seed storage compound accumulation and/or solute partitioning within the plant tissue and organs is well known. An example is provided by Mitsukawa et al. (1997, Proc. Natl. Acad. Sci. USA 94:7098-7102), where overexpression of an Arabidopsis high-affinity phosphate transporter gene in tobacco cultured cells enhanced cell growth under phosphate-limited conditions. Phosphate availability also affects significantly the production of sugars and metabolic intermediates (Hurry et al. 2000, Plant J. 24:383-396) and the lipid composition in leaves and roots (Härtel et al. 2000, Proc. Natl. Acad. Sci. USA 97:10649-10654). Likewise, the activity of the plant ACCase has been demonstrated to be regulated by phosphorylation (Savage & Ohlrogge 1999, Plant J. 18:521-527) and alterations in the activity of the kinases and phosphatases (LMPs) that act on the ACCase could lead to increased or decreased levels of seed lipid accumulation. Moreover, the presence of lipid kinase activities in chloroplast envelope membranes suggests that signal transduction pathways and/or membrane protein regulation occur in envelopes (see, e.g., Müller et al. 2000, J. Biol. Chem. 275:19475-19481 and literature cited therein). The ABI1 and ABI2 genes encode two protein serine/threonine phosphatases 2C, which are regulators in abscisic acid signaling pathway, and thereby in early and late seed development (e.g. Merlot et al. 2001, Plant J. 25:295-303). For more examples see also the section “Background of the Invention.”

[0248] Throughout this application, various publications are referenced. The disclosures of all of these publications and those references cited within those publications in their entireties are hereby incorporated by reference into this application in order to more fully describe the state of the art to which this invention pertains.

[0249] It will be apparent to those skilled in the art that various modifications and variations can be made in the present invention without departing from the scope or spirit of the invention. Other embodiments of the invention will be apparent to those skilled in the art from consideration of the specification and practice of the invention disclosed herein. It is intended that the specification and Examples be considered as exemplary only, with a true scope and spirit of the invention being indicated by the claims included herein.

### FIGURES

[0250] FIG. 1: Oil content in T2 seeds of transgenic Arabidopsis plants transformed with the empty vector LOO120 (control) and the construct C4BR/10, thereby engineered to seed specifically overexpress the genes encoded by SEQ ID 1006+981, SEQ ID 939 and SEQ ID 949 under control of the seed specific promoters described by SEQ ID 1004, SEQ ID 997 and SEQ ID 998, respectively. The oil content has been determined by triplicate quantification of the total fatty acid methyl esters using gas-liquid chromatography. Each circle represents the data obtained with 3 replicates of 5 mg bulked seeds from one individual plant. The average seed oil content across all control plants (n=8) is 30.3%±0.9% (range from 28.7%-31.4%). The average seed oil content in the seeds across all C4BR/10 events (n=10) is 31.7%±1.7% (range from 29.5%-34.7%). This represents a significant average relative increase in the seed oil content of 4.6% across all transgenic events transformed with C4BR/10 (p<0.1 as obtained by simple t-test). The maximum relative oil increase achieved relative to the empty vector control was 14.4% in one event.

[0251] FIG. 2: Oil content in T2 seeds of transgenic Arabidopsis plants transformed with the empty vector LOO120 (control) and the construct C5BR/2, thereby engineered to seed specifically overexpress the genes encoded by SEQ ID 961, SEQ ID 941 and SEQ ID 987 under control of the seed specific promoters described by SEQ ID 1004, SEQ ID 997 and SEQ ID 1001, respectively. The oil content has been determined by triplicate quantification of the total fatty acid methyl esters using gas-liquid chromatography. Each circle represents the data obtained with 3 replicates of 5 mg bulked seeds from one individual plant. The average seed oil content across all control plants (n=8) is 30%±1.5% (range from 27.4%-32.8%). The average seed oil content in the seeds across all C5BR/2 events (n=20) is 32.4%±0.6% (range from 29.9%-33.5%). This represents a significant average relative increase in the seed oil content of 8% across all independent transgenic events transformed with C5BR/2 (p<0.00024 as obtained by simple t-test). The maximum relative oil increase achieved relative to the empty vector control was 11.8% in one event.

[0252] FIG. 3: Oil content in T2 seeds of transgenic Arabidopsis plants transformed with the empty vector LOO120 (control) and the construct C5BR/3, thereby engineered to seed specifically overexpress the genes encoded by SEQ ID 450, 1006+436 and 1006+1 under control of the seed specific promoters described by SEQ ID 994, SEQ ID 999 and SEQ ID 1004, respectively. The oil content has been determined by triplicate quantification of the total fatty acid methyl esters using gas-liquid chromatography. Each circle represents the data obtained with 3 replicates of 5 mg bulked seeds from one individual plant. The average seed oil content across all control plants (n=8) is 29.6%±1.1% (range from 27.9%-31.5%). The average seed oil content in the seeds of across C5BR/3 events (n=20) is 30.3%±1.3% (range from 28.0%-32.6%). This represents a significant average relative increase in the seed oil content of 2.5% across all independent transgenic events transformed with C5BR/3 (p<0.19 as obtained by simple t-test). The maximum relative oil increase achieved relative to the empty vector control was 10.1% in one event.

[0253] FIG. 4: Oil content in T2 seeds of transgenic Arabidopsis plants transformed with the empty vector LOO120 (control) and the construct C5BF/7, thereby engineered to seed specifically overexpress the genes encoded by SEQ ID 975 and SEQ ID 977 both under control of the seed specific promoters described by SEQ ID 1000. The oil content has been determined by triplicate quantification of the total fatty acid methyl esters using gas-liquid chromatography. Each circle represents the date obtained with 3 replicates of 5 mg bulked seeds of one individual plant. The average seed oil content of all control plants (n=8) is 36.5%±1.5% (range from 31.7%-38.7%). The average seed oil content in the seeds of all C5BF/7 lines (n=36) is 37.5%±1.8% (range from 31.6%-40.4%). This represents a significant average relative increase in the seed oil content of 2.6% across all transgenic events transformed with C5BF/7 (p<0.08 as obtained by simple t-test). The maximum relative oil increase achieved relative to the empty vector control was 10.5% in one event.

[0254] FIG. 5: Relative changes in the seed oil content of transgenic Brassica napus plants genetically engineered to seed-specifically down regulate the TAG lipase encoded by SEQ ID NO: 993 and over express the BnWRI1 gene encoded by SEQ ID NO: 997.

[0255] FIG. 6: Seed oil content frequency distribution analysis (SOCFDA) of events of transgenic Brassica napus plants genetically engineered to seed-specifically down regulate the TAG lipase encoded by SEQ ID NO: 993 and over express the BnWRI1 gene encoded by SEQ ID NO: 997 as well as of Brassica napus wild type plants.

### EXAMPLES

### Example 1

[0256] General Processes—a) General Cloning Processes. Cloning processes such as, for example, restriction cleavages, agarose gel electrophoresis, purification of DNA fragments, transfer of nucleic acids to nitrocellulose and nylon membranes, linkage of DNA fragments, transformation of Escherichia coli and yeast cells, growth of bacteria and sequence analysis of recombinant DNA were carried out as described in Sambrook et al. (1989, Cold Spring Harbor Laboratory Press: ISBN 0-87969-309-6) or Kaiser, Michaelis and Mitchell (1994, “Methods in Yeast Genetics,” Cold Spring Harbor Laboratory Press: ISBN 0-87969-451-3).

[0257] General Processes—b) Chemicals. The chemicals used were obtained, if not mentioned otherwise in the text, in p.a. quality from the companies Fluka (Neu-Ulm), Merck (Darmstadt), Roth (Karlsruhe), Serva (Heidelberg) and Sigma (Deisenhofen). Solutions were prepared using purified, pyrogen-free water, designated as H2O in the following text, from a Milli-Q water system water purification plant (Millipore, Eschborn). Restriction endonucleases, DNA-modifying enzymes and molecular biology kits were obtained from the companies AGS (Heidelberg), Amersham (Braunschweig), Biometra (Göttingen), Roche (Mannheim), Genomed (Bad Oeynnhausen), New England Biolabs (Schwalbach/Taunus), Novagen (Madison, Wis., USA), Perkin-Elmer (Weiterstadt), Pharmacia (Freiburg), Qiagen (Hilden) and Stratagene (Amsterdam, Netherlands). They were used, if not mentioned otherwise, according to the manufacturer's instructions.

[0258] General Processes—c) Plant Material and Growth: Arabidopsis plants. For this study, root material, leaves, siliques and seeds of wild-type and transgenic plants of Arabidopsis thaliana expressing combinations of LMPs as described within this invention were used. Wild type and transgenic Arabidopsis seeds were preincubated for three days in the dark at 4° C. before placing them into an incubator (AR-75, Percival Scientific, Boone, Iowa) at a photon flux density of 60-80 μmol m⁻² s⁻¹ and a light period of 16 hours (22° C.), and a dark period of 8 hours (18° C.). All plants were started on half-strength MS medium (Murashige & Skoog, 1962, Physiol. Plant. 15, 473-497), pH 6.2, 2% sucrose and 1.2% agar. Seeds were sterilized for 20 minutes in 20% bleach 0.5% triton X100 and rinsed 6 times with excess sterile water.

### Example 2

[0259] Total DNA Isolation from Plants. The details for the isolation of total DNA relate to the working up of 1 gram fresh weight of plant material.

[0260] CTAB buffer: 2% (w/v) N-cethyl-N,N,N-trimethylammonium bromide (CTAB); 100 mM Tris HCl pH 8.0; 1.4 M NaCl; 20 mM EDTA. N-Laurylsarcosine buffer: 10% (w/v) N-laurylsarcosine; 100 mM Tris HCl pH 8.0; 20 mM EDTA.

[0261] The plant material was triturated under liquid nitrogen in a mortar to give a fine powder and transferred to 2 ml Eppendorf vessels. The frozen plant material was then covered with a layer of 1 ml of decomposition buffer (1 ml CTAB buffer, 100 μl of N-laurylsarcosine buffer, 20 μl of β-mercaptoethanol and 10 μl of proteinase K solution, 10 mg/ml) and incubated at 60° C. for 1 hour with continuous shaking. The homogenate obtained was distributed into two Eppendorf vessels (2 ml) and extracted twice by shaking with the same volume of chloroform/isoamyl alcohol (24:1). For phase separation, centrifugation was carried out at 8000 g and RT for 15 min in each case. The DNA was then precipitated at −70° C. for 30 min using ice-cold isopropanol. The precipitated DNA was sedimented at 4° C. and 10,000 g for 30 min and resuspended in 180 μl of TE buffer (Sambrook et al. 1989, Cold Spring Harbor Laboratory Press: ISBN 0-87969-309-6). For further purification, the DNA was treated with NaCl (1.2 M final concentration) and precipitated again at −70° C. for 30 min using twice the volume of absolute ethanol. After a washing step with 70% ethanol, the DNA was dried and subsequently taken up in 50 μl of H₂O+RNAse (50 mg/ml final concentration). The DNA was dissolved overnight at 4° C. and the RNAse digestion was subsequently carried out at 37° C. for 1 h. Storage of the DNA took place at 4° C.

### Example 3

[0262] Isolation of Total RNA and poly-(A)+RNA from Plants—Arabidopsis thaliana. For the investigation of transcripts, both total RNA and poly-(A)+RNA were isolated.

[0263] RNA is isolated from siliques of Arabidopsis plants according to the following procedure:

RNA preparation from Arabidopsis seeds—“hot” extraction:
1. Buffers, enzymes and solution
[0264] 2M KCl
[0265] Proteinase K
[0266] Phenol (for RNA)
[0267] Chloroform:Isoamylalcohol
[0268] (Phenol:choloroform 1:1; pH adjusted for RNA)
[0269] 4 M LiCl, DEPC-treated
[0270] DEPC-treated water
[0271] 3M NaOAc, pH 5, DEPC-treated
[0272] Isopropanol
[0273] 70% ethanol (made up with DEPC-treated water)
[0274] Resuspension buffer: 0.5% SDS, 10 mM Tris pH 7.5, 1 mM EDTA made up with DEPC-treated water as this solution cannot be DEPC-treated
[0275] Extraction Buffer:
[0276] 0.2M Na Borate
[0277] 30 mM EDTA
[0278] 30 mM EGTA
[0279] 1% SDS (250 μl of 10% SDS-solution for 2.5 ml buffer)
[0280] 1% Deoxycholate (25 mg for 2.5 ml buffer)
[0281] 2% PVPP (insoluble—50 mg for 2.5 ml buffer)
[0282] 2% PVP 40K (50 mg for 2.5 ml buffer)
[0283] 10 mM DTT
   100 mM β-Mercaptoethanol (fresh, handle under fume hood—use 35 μl of 14.3M solution for 5 ml buffer)
   2. Extraction. Heat extraction buffer up to 80° C. Grind tissue in liquid nitrogen-cooled mortar, transfer tissue powder to 1.5 ml tube. Tissue should be kept frozen until buffer is added so transfer the sample with pre-cooled spatula and keep the tube in liquid nitrogen all time. Add 350 μl preheated extraction buffer (here for 100 mg tissue, buffer volume can be as much as 500 μl for bigger samples) to tube, vortex and heat tube to 80° C. for ˜1 min. Keep then on ice. Vortex sample, grind additionally with electric mortar.
   3. Digestion. Add Proteinase K (0.15 mg/100 mg tissue), vortex and keep at 37° C. for one hour.

[0284] First Purification. Add 27 μl 2M KCl. Chill on ice for 10 min. Centrifuge at 12.000 rpm for 10 minutes at room temperature. Transfer supernatant to fresh, RNAase-free tube and do one phenol extraction, followed by a chloroform:isoamylalcohol extraction. Add 1 vol. isopropanol to supernatant and chill on ice for 10 min. Pellet RNA by centrifugation (7000 rpm for 10 min at RT). Resolve pellet in 1 ml 4M LiCl by 10 to 15 min vortexing. Pellet RNA by 5 min centrifugation.

[0285] Second Purification. Resuspend pellet in 500 μl Resuspension buffer. Add 500 μl phenol and vortex. Add 250 μl chloroform:isoamylalcohol and vortex. Spin for 5 min. and transfer supernatant to fresh tube. Repeat chloform:isoamylalcohol extraction until interface is clear. Transfer supernatant to fresh tube and add 1/10 vol 3M NaOAc, pH 5 and 600 μl isopropanol. Keep at −20 for 20 min or longer. Pellet RNA by 10 min centrifugation. Wash pellet once with 70% ethanol. Remove all remaining alcohol before resolving pellet with 15 to 20 μl DEPC-water. Determine quantity and quality by measuring the absorbance of a 1:200 dilution at 260 and 280 nm. 40 μg RNA/ml=1OD260

[0286] RNA from wild-type and the transgenic Arabidopsis-plants is isolated as described (Hosein, 2001, Plant Mol. Biol. Rep., 19, 65a-65e; Ruuska, S. A., Girke, T., Benning, C., & Ohlrogge, J. B., 2002, Plant Cell, 14, 1191-1206).

[0287] The mRNA is prepared from total RNA, using the Amersham Pharmacia Biotech mRNA purification kit, which utilizes oligo(dT)-cellulose columns.

[0288] Isolation of Poly-(A)+RNA was isolated using Dyna BeadsR (Dynal, Oslo, Norway) following the instructions of the manufacturer's protocol. After determination of the concentration of the RNA or of the poly(A)+RNA, the RNA was precipitated by addition of 1/10 volumes of 3 M sodium acetate pH 4.6 and 2 volumes of ethanol and stored at −70° C.

### Example 4

[0289] cDNA Library Construction. For cDNA library construction, first strand synthesis was achieved using Murine Leukemia Virus reverse transcriptase (Roche, Mannheim, Germany) and oligo-d(T)-primers, second strand synthesis by incubation with DNA polymerase I, Klenow enzyme and RNAseH digestion at 12° C. (2 h), 16° C. (1 h) and 22° C. (1 h). The reaction was stopped by incubation at 65° C. (10 min) and subsequently transferred to ice. Double stranded DNA molecules were blunted by T4-DNA-polymerase (Roche, Mannheim) at 37° C. (30 min). Nucleotides were removed by phenol/chloroform extraction and Sephadex G50 spin columns. EcoRI adapters (Pharmacia, Freiburg, Germany) were ligated to the cDNA ends by T4-DNA-ligase (Roche, 12° C., overnight) and phosphorylated by incubation with polynucleotide kinase (Roche, 37° C., 30 min). This mixture was subjected to separation on a low melting agarose gel. DNA molecules larger than 300 base pairs were eluted from the gel, phenol extracted, concentrated on Elutip-D-columns (Schleicher and Schuell, Dassel, Germany) and were ligated to vector arms and packed into lambda ZAPII phages or lambda ZAP-Express phages using the Gigapack Gold Kit (Stratagene, Amsterdam, Netherlands) using material and following the instructions of the manufacturer.

### Example 5

[0290] Northern-Hybridization. For RNA hybridization, 20 μg of total RNA or 1 μg of poly-(A)+RNA is separated by gel electrophoresis in 1.25% agarose gels using formaldehyde as described in Amasino (1986, Anal. Biochem. 152:304), transferred by capillary attraction using 10×SSC to positively charged nylon membranes (Hybond N+, Amersham, Braunschweig), immobilized by UV light and pre-hybridized for 3 hours at 68° C. using hybridization buffer (10% dextran sulfate w/v, 1 M NaCl, 1% SDS, 100 μg/ml of herring sperm DNA). The labeling of the DNA probe with the Highprime DNA labeling kit (Roche, Mannheim, Germany) is carried out during the pre-hybridization using alpha-32P dCTP (Amersham, Braunschweig, Germany). Hybridization is carried out after addition of the labeled DNA probe in the same buffer at 68° C. overnight. The washing steps are carried out twice for 15 min using 2×SSC and twice for 30 min using 1×SSC, 1% SDS at 68° C. The exposure of the sealed filters is carried out at −70° C. for a period of 1 day to 14 days.

### Example 6

[0291] Plasmids for Plant Transformation. For plant transformation binary vectors such as pBinAR can be used (Höfgen & Willmitzer 1990, Plant Sci. 66:221-230). Construction of the binary vectors can be performed by ligation of the cDNA in sense or antisense orientation into the T-DNA. 5′ to the cDNA a plant promoter activates transcription of the cDNA. A polyadenylation sequence is located 3′ to the cDNA. Tissue-specific expression can be achieved by using a tissue specific promoter. For example, seed-specific expression can be achieved by cloning the napin or LeB4 or USP promoter 5′ to the cDNA. Also any other seed specific promoter element can be used. For constitutive expression within the whole plant the CaMV 35S promoter can be used. The expressed protein can be targeted to a cellular compartment using a signal peptide, for example for plastids, mitochondria, or endoplasmic reticulum (Kermode 1996, Crit. Rev. Plant Sci. 15:285-423). The signal peptide is cloned 5′ in frame to the cDNA to achieve subcellular localization of the fusion protein.

[0292] Further examples for plant binary vectors are the pSUN300 or pSUN2-GW vectors, into which the combination of LMP genes are cloned. These binary vectors contain an antibiotic resistance gene driven under the control of the NOS promoter and combinations containing promoters as listed in Table 3, LMP genes as shown in FIG. 1 and terminators in FIG. 3 Partial or full-length LMP cDNA are cloned into the multiple cloning site of the pEntry vector in sense or antisense orientation behind a seed-specific promoters or constitutive promoter (see FIG. 2) in the combinations shown in Table 3 using standard cloning procedures using restriction enzymes such as ASCI, PACI, NotP and StuI. Two or more pEntry vectors containing different LMPs are then combined with a pSUN destination vector to form a binary vector containing the combinations as listed in Table 9 of FIG. 8 by the use of the GATEWAY technology (Invitrogen, http://www.invitrogen.com) following the manufacturer's instructions. The recombinant vector containing the combination of interest is transformed into Top10 cells (Invitrogen) using standard conditions. Trans-formed cells are selected for on LB agar containing 50 μg/ml kanamycin grown overnight at 37° C. Plasmid DNA is extracted using the QIAprep Spin Miniprep Kit (Qiagen) following manufacturer's instructions. Analysis of subsequent clones and restriction mapping is performed according to standard molecular biology techniques (Sambrook et al. 1989, Molecular Cloning, A Laboratory Manual. 2nd Edition. Cold Spring Harbor Laboratory Press. Cold Spring Harbor, N.Y.).

### Example 7

[0293] Agrobacterium Mediated Plant Transformation. Agrobacterium mediated plant transformation with the combination of LMP nucleic acids described herein can be performed using standard transformation and regeneration techniques (Gelvin, Stanton B. & Schilperoort R. A, Plant Molecular Biology Manual, 2nd ed. Kluwer Academic Publ., Dordrecht 1995 in Sect., Ringbuc Zentrale Signatur: BT11-P; Glick, Bernard R. and Thompson, John E. Methods in Plant Molecular Biology and Biotechnology, S. 360, CRC Press, Boca Raton 1993). For example, Agrobacterium mediated transformation can be performed using the GV3 (pMP90) (Koncz & Schell, 1986, Mol. Gen. Genet. 204:383-396) or LBA4404 (Clontech) Agrobacterium tumefaciens strain.

[0294] Arabidopsis thaliana can be grown and transformed according to standard conditions (Bechtold 1993, Acad. Sci. Paris. 316:1194-1199; Bent et al. 1994, Science 265:1856-1860). Additionally, rapeseed can be transformed with the combination of LMP nucleic acids of the present invention via cotyledon or hypocotyl transformation (Moloney et al. 1989, Plant Cell Report 8:238-242; De Block et al. 1989, Plant Physiol. 91:694-701). Use of antibiotic for Agrobacterium and plant selection depends on the binary vector and the Agrobacterium strain used for transformation. Rapeseed selection is normally performed using a selectable plant marker. Additionally, Agrobacterium mediated gene transfer to flax can be performed using, for example, a technique described by Mlynarova et al. (1994, Plant Cell Report 13:282-285).

[0295] The LMPs in the combinations described in this invention can be expressed under the control of a seed-specific promoter. In the examples shown in table 4 these promoters were selected from the group consisting of the USP (unknown seed protein) promoter (Baeumlein et al. 1991, Mol. Gen. Genetics 225:459-67) (SEQ ID NO: 1004), SBP1000 (SEQ ID NO: 1001), BnGLP (SEQ ID NO: 994), STPT (SEQ ID NO: 1003), LegB4 (LeB4; Baeumlein et al. 1992, Plant J. 2:233-239) (SEQ ID NO: 997), LuPXR1727 (SEQ D NO. 999), Vicillin (SEQ ID NO: 1005), Napin A (SQ ID NO: 1000), LuPXR (SEQ ID NO: 998), Conlinin (SEQ ID NO: 996), pVfSBP (SEQ ID NO: 1002), Leb4 (SEQ ID NO: 997), pVfVic (SEQ ID NO: 1005) and Oleosin promoter (SEQ ID NO: 995). Alternatively the LMPs in the combinations described in this invention can be expressed under control of constitutive promoters such as the PtxA promoter (the promoter of the Pisum sativum PtxA gene), which is a promoter active in virtually all plant tissues or the superpromoter, which is a constitutive promoter (Stanton B. Gelvin, U.S. Pat. No. 5,428,147 and U.S. Pat. No. 5,217,903) as well as promoters conferring seed-specific expression in monocot plants like maize, barley, wheat, rye, rice, etc.

[0296] The nptII gene was used as a selectable marker in these constructs. Table 3 shows the setup of the binary vectors containing the combinations of LMPs.

[0297] Transformation of soybean can be performed using, for example, a technique described in EP 0424 047, U.S. Pat. No. 5,322,783 (Pioneer Hi-Bred International) or in EP 0397 687, U.S. Pat. No. 5,376,543 or U.S. Pat. No. 5,169,770 (University Toledo), or by any of a number of other transformation procedures known in the art. Soybean seeds are surface sterilized with 70% ethanol for 4 minutes at room temperature with continuous shaking, followed by 20% (v/v) CLOROX supplemented with 0.05% (v/v) TWEEN for 20 minutes with continuous shaking. Then the seeds are rinsed 4 times with distilled water and placed on moistened sterile filter paper in a Petri dish at room temperature for 6 to 39 hours. The seed coats are peeled off, and cotyledons are detached from the embryo axis. The embryo axis is examined to make sure that the meristematic region is not damaged. The excised embryo axes are collected in a half-open sterile Petri dish and air-dried to a moisture content less than 20% (fresh weight) in a sealed Petri dish until further use.

[0298] The method of plant transformation is also applicable to Brassica napus and other crops. In particular, seeds of canola are surface sterilized with 70% ethanol for 4 minutes at room temperature with continuous shaking, followed by 20% (v/v) CLOROX supplemented with 0.05% (v/v) TWEEN for 20 minutes, at room temperature with continuous shaking. Then, the seeds are rinsed four times with distilled water and placed on moistened sterile filter paper in a Petri dish at room temperature for 18 hours. The seed coats are removed and the seeds are air dried overnight in a half-open sterile Petri dish. During this period, the seeds lose approximately 85% of their water content. The seeds are then stored at room temperature in a sealed Petri dish until further use.

[0299] Agrobacterium tumefaciens culture is prepared from a single colony in LB solid medium plus appropriate antibiotics (e.g. 100 mg/l streptomycin, 50 mg/l kanamycin) followed by growth of the single colony in liquid LB medium to an optical density at 600 nm of 0.8. Then, the bacteria culture is pelleted at 7000 rpm for 7 minutes at room temperature, and resuspended in MS (Murashige & Skoog 1962, Physiol. Plant. 15:473-497) medium supplemented with 100 mM acetosyringone. Bacteria cultures are incubated in this pre-induction medium for 2 hours at room temperature before use. The axis of soybean zygotic seed embryos at approximately 44% moisture content are imbibed for 2 hours at room temperature with the pre-induced Agrobacterium suspension culture. (The imbibition of dry embryos with a culture of Agrobacterium is also applicable to maize embryo axes). The embryos are removed from the imbibition culture and are transferred to Petri dishes containing solid MS medium supplemented with 2% sucrose and incubated for 2 days, in the dark at room temperature. Alternatively, the embryos are placed on top of moistened (liquid MS medium) sterile filter paper in a Petri dish and incubated under the same conditions described above. After this period, the embryos are transferred to either solid or liquid MS medium supplemented with 500 mg/l carbenicillin or 300 mg/l cefotaxime to kill the agrobacteria. The liquid medium is used to moisten the sterile filter paper. The embryos are incubated during 4 weeks at 25° C., under 440 μmol m⁻²s⁻¹ and 12 hours photoperiod. Once the seedlings have produced roots, they are transferred to sterile metromix soil. The medium of the in vitro plants is washed off before transferring the plants to soil. The plants are kept under a plastic cover for 1 week to favor the acclimatization process. Then the plants are transferred to a growth room where they are incubated at 25° C., under 440 μmol m⁻²s⁻¹ light intensity and 12-hour photoperiod for about 80 days.

[0300] Samples of the primary transgenic plants (T₀) are analyzed by PCR to confirm the presence of T-DNA. These results are confirmed by Southern hybridization wherein DNA is electrophoresed on a 1% agarose gel and transferred to a positively charged nylon membrane (Roche Diagnostics). The PCR DIG Probe Synthesis Kit (Roche Diagnostics) is used to prepare a digoxigenin-labeled probe by PCR as recommended by the manufacturer.

### Example 8

[0301] In vivo Mutagenesis. In vivo mutagenesis of microorganisms can be performed by incorporation and passage of the plasmid (or other vector) DNA through E. coli or other microorganisms (e.g. Bacillus spp. or yeasts such as Sacchromyces) that are impaired in their capabilities to maintain the integrity of their genetic information. Typical mutator strains have mutations in the genes for the DNA repair system (e.g., mutHLS, mutD, mutT, etc.; for reference, see Rupp W. D. 1996, DNA repair mechanisms, in: Escherichia coli and Salmonella, p. 2277-2294, ASM: Washington). Such strains are well known to those skilled in the art. The use of such strains is illustrated, for example, in Greener and Callahan 1994, Strategies 7:32-34. Transfer of mutated DNA molecules into plants is preferably done after selection and testing in microorganisms. Transgenic plants are generated according to various examples within the exemplification of this document.

### Example 9

[0302] Assessment of the mRNA Expression and Activity of a Recombinant Gene Product in the Transformed Organism. The activity of a recombinant gene product in the transformed host organism can be measured on the transcriptional or/and on the translational level. A useful method to ascertain the level of transcription of the gene (an indicator of the amount of mRNA available for translation to the gene product) is to perform a Northern blot (for reference see, for example, Ausubel et al. 1988, Current Protocols in Molecular Biology, Wiley: New York), in which a primer designed to bind to the gene of interest is labeled with a detectable tag (usually radioactive or chemiluminescent), such that when the total RNA of a culture of the organism is extracted, run on gel, transferred to a stable matrix and incubated with this probe, the binding and quantity of binding of the probe indicates the presence and also the quantity of mRNA for this gene. This information at least partially demonstrates the degree of transcription of the transformed gene. Total cellular RNA can be prepared from plant cells, tissues or organs by several methods, all well-known in the art, such as that described in Bormann et al. (1992, Mol. Microbiol. 6:317-326).

[0303] To assess the presence or relative quantity of protein translated from this mRNA, standard techniques, such as a Western blot, may be employed (see, for example, Ausubel et al. 1988, Current Protocols in Molecular Biology, Wiley: New York). In this process, total cellular proteins are extracted, separated by gel electrophoresis, transferred to a matrix such as nitrocellulose, and incubated with a probe, such as an antibody, which specifically binds to the desired protein. This probe is generally tagged with a chemiluminescent or colorimetric label, which may be readily detected. The presence and quantity of label observed indicates the presence and quantity of the desired mutant protein present in the cell.

[0304] The activity of LMPs that bind to DNA can be measured by several well-established methods, such as DNA band-shift assays (also called gel retardation assays). The effect of such LMP on the expression of other molecules can be measured using reporter gene assays (such as that described in Kolmar H. et al. 1995, EMBO J. 14:3895-3904 and references cited therein). Reporter gene test systems are well known and established for applications in both prokaryotic and eukaryotic cells, using enzymes, such as beta-galactosidase, green fluorescent protein, and several others.

[0305] The determination of activity of lipid metabolism membrane-transport proteins can be performed according to techniques such as those described in Gennis R. B. (1989 Pores, Channels and Transporters, in Biomembranes, Molecular Structure and Function, Springer: Heidelberg, pp. 85-137, 199-234 and 270-322).

### Example 10

[0306] In vitro Analysis of the activity of LMPS expressed in combinations in Transgenic Plants. The determination of activities and kinetic parameters of enzymes is well established in the art. Experiments to determine the activity of any given altered enzyme must be tailored to the specific activity of the wild-type enzyme, which is well within the ability of one skilled in the art. Overviews about enzymes in general, as well as specific details concerning structure, kinetics, principles, methods, applications, and examples for the determination of many enzyme activities may be found, for example, in the following references: Dixon, M. & Webb, E. C. 1979, Enzymes. Longmans: London; Fersht, (1985) Enzyme Structure and Mechanism. Freeman: New York; Walsh (1979) Enzymatic Reaction Mechanisms. Freeman: San Francisco; Price, N. C., Stevens, L. (1982) Fundamentals of Enzymology. Oxford Univ. Press: Oxford; Boyer, P. D., ed. (1983) The Enzymes, 3rd ed. Academic Press: New York; Bisswanger, H., (1994) Enzymkinetik, 2nd ed. VCH: Weinheim (ISBN 3527300325); Bergmeyer, H. U., Bergmeyer, J., Graβl, M., eds. (1983-1986) Methods of Enzymatic Analysis, 3rd ed., vol. I-XII, Verlag Chemie: Weinheim; and Ullmann's Encyclopedia of Industrial Chemistry (1987) vol. A9, Enzymes. VCH: Weinheim, p. 352-363.

### Example 11

[0307] Analysis of the Impact of Combinations of Recombinant Proteins on the Production of a Desired Seed Storage Compound. Seeds from transformed Arabidopsis thaliana plants were analyzed by gas chromatography (GC) for total oil content and fatty acid profile. GC analysis reveals that Arabidopsis plants transformed with a construct containing a combination of LMPs as described herein.

[0308] The results suggest that overexpression of the combination of LMPs as described in Table 3 allows the manipulation of total seed oil content. As controls plants transformed with the empty vector, i.e. pSun2 without the combination of trait genes, were grown together with the plants harbouring the combinations of LMPs and their seeds analysed simultaneously. Results of exemplary combinations of Table 3 are shown in FIGS. 1 to 4. Control plants were non-transgenic segregants grown together with the transgenic plants carrying the combination of LMPs. The p-values shown were calculated using simple t-test.

[0309] The effect of the genetic modification in plants on a desired seed storage compound (such as a sugar, lipid or fatty acid) can be assessed by growing the modified plant under suitable conditions and analyzing the seeds or any other plant organ for increased production of the desired product (i.e., a lipid or a fatty acid). Such analysis techniques are well known to one skilled in the art, and include spectroscopy, thin layer chromatography, staining methods of various kinds, enzymatic and microbiological methods, and analytical chromatography such as high performance liquid chromatography (see, for example, Ullman 1985, Encyclopedia of Industrial Chemistry, vol. A2, pp. 89-90 and 443-613, VCH: Weinheim; Fallon, A. et al. 1987, Applications of HPLC in Biochemistry in: Laboratory Techniques in Biochemistry and Molecular Biology, vol. 17; Rehm et al., 1993 Product recovery and purification, Biotechnology, vol. 3, Chapter III, pp. 469-714, VCH: Weinheim; Belter, P. A. et al., 1988 Bioseparations: downstream processing for biotechnology, John Wiley & Sons; Kennedy J. F. & Cabral J. M. S. 1992, Recovery processes for biological materials, John Wiley and Sons; Shaeiwitz J. A. & Henry J. D. 1988, Biochemical separations in: Ulmann's Encyclopedia of Industrial Chemistry, Separation and purification techniques in biotechnology, vol. B3, Chapter 11, pp. 1-27, VCH: Weinheim; and Dechow F. J. 1989). Besides the above-mentioned methods, plant lipids are extracted from plant material as described by Cahoon et al. (1999, Proc. Natl. Acad. Sci. USA 96, 22:12935-12940) and Browse et al. (1986, Anal. Biochemistry 442:141-145). Qualitative and quantitative lipid or fatty acid analysis is described in Christie, William W., Advances in Lipid Methodology. Ayr/Scotland: Oily Press. —(Oily Press Lipid Library; Christie, William W., Gas Chromatography and Lipids. A Practical Guide—Ayr, Scotland: Oily Press, 1989 Repr. 1992. —IX, 307 S. —(Oily Press Lipid Library; and “Progress in Lipid Research,” Oxford: Pergamon Press, 1 (1952)-16 (1977) Progress in the Chemistry of Fats and Other Lipids CODEN.

[0310] Unequivocal proof of the presence of fatty acid products can be obtained by the analysis of transgenic plants following standard analytical procedures: GC, GC-MS or TLC as variously described by Christie and references therein (1997 in: Advances on Lipid Methodology 4th ed.: Christie, Oily Press, Dundee, pp. 119-169; 1998). Detailed methods are described for leaves by Lemieux et al. (1990, Theor. Appl. Genet. 80:234-240), and for seeds by Focks & Benning (1998, Plant Physiol. 118:91-101).

[0311] Positional analysis of the fatty acid composition at the sn-1, sn-2 or sn-3 positions of the glycerol backbone is determined by lipase digestion (see, e.g., Siebertz & Heinz 1977, Z. Naturforsch. 32c:193-205, and Christie 1987, Lipid Analysis 2nd Edition, Pergamon Press, Exeter, ISBN 0-08-023791-6).

[0312] Total seed oil levels can be measured by any appropriate method. Quantitation of seed oil contents is often performed with conventional methods, such as near infrared analysis (NIR) or nuclear magnetic resonance imaging (NMR). NIR spectroscopy has become a standard method for screening seed samples whenever the samples of interest have been amenable to this technique. Samples studied include canola, soybean, maize, wheat, rice, and others. NIR analysis of single seeds can be used (see e.g. Velasco et al., Estimation of seed weight, oil content and fatty acid composition in intact single seeds of rapeseed (Brassica napus L.) by near-infrared reflectance spectroscopy, Euphytica, Vol. 106, 1999, pp. 79-85). NMR has also been used to analyze oil content in seeds (see e.g. Robertson & Morrison, “Analysis of oil content of sunflower seed by wide-line NMR,” Journal of the American Oil Chemists Society, 1979, Vol. 56, 1979, pp. 961-964, which is herein incorporated by reference in its entirety).

[0313] A typical way to gather information regarding the influence of increased or decreased protein activities on lipid and sugar biosynthetic pathways is for example via analyzing the carbon fluxes by labeling studies with leaves or seeds using ¹⁴C-acetate or ¹⁴C-pyruvate (see, e.g. Focks & Benning 1998, Plant Physiol. 118:91-101; Eccleston & Ohlrogge 1998, Plant Cell 10:613-621). The distribution of carbon-14 into lipids and aqueous soluble components can be determined by liquid scintillation counting after the respective separation (for example on TLC plates) including standards like ¹⁴C-sucrose and ¹⁴C-malate (Eccleston & Ohlrogge 1998, Plant Cell 10:613-621).

[0314] Material to be analyzed can be disintegrated via sonification, glass milling, liquid nitrogen, and grinding, or via other applicable methods. The material has to be centrifuged after disintegration. The sediment is re-suspended in distilled water, heated for 10 minutes at 100° C., cooled on ice and centrifuged again followed by extraction in 0.5 M sulfuric acid in methanol containing 2% dimethoxypropane for 1 hour at 90° C. leading to hydrolyzed oil and lipid compounds resulting in transmethylated lipids. These fatty acid methyl esters are extracted in petrolether and finally subjected to GC analysis using a capillary column (Chrompack, WCOT Fused Silica, CP-Wax-52 CB, 25 m, 0.32 mm) at a temperature gradient between 170° C. and 240° C. for 20 minutes and 5 min. at 240° C. The identity of resulting fatty acid methylesters is defined by the use of standards available form commercial sources (i.e., Sigma).

[0315] In case of fatty acids where standards are not available, molecule identity is shown via derivatization and subsequent GC-MS analysis. For example, the localization of triple bond fatty acids is shown via GC-MS after derivatization via 4,4-Dimethoxy-oxazolin-Derivaten (Christie, Oily Press, Dundee, 1998).

[0316] A common standard method for analyzing sugars, especially starch, is published by Stitt M., Lilley R. Mc. C., Gerhardt R. and Heldt M. W. (1989, “Determination of metabolite levels in specific cells and subcellular compartments of plant leaves” Methods Enzymol. 174:518-552; for other methods see also Härtel et al. 1998, Plant Physiol. Biochem. 36:407-417 and Focks & Benning 1998, Plant Physiol. 118:91-101).

[0317] For the extraction of soluble sugars and starch, 50 seeds are homogenized in 500 μl of 80% (v/v) ethanol in a 1.5-ml polypropylene test tube and incubated at 70° C. for 90 min. Following centrifugation at 16,000 g for 5 min, the supernatant is transferred to a new test tube. The pellet is extracted twice with 500 μl of 80% ethanol. The solvent of the combined supernatants is evaporated at room temperature under a vacuum. The residue is dissolved in 50 μl of water, representing the soluble carbohydrate fraction. The pellet left from the ethanol extraction, which contains the insoluble carbohydrates including starch, is homogenized in 200 μl of 0.2 N KOH, and the suspension is incubated at 95° C. for 1 h to dissolve the starch. Following the addition of 35 μl of 1 N acetic acid and centrifugation for 5 min at 16,000, the supernatant is used for starch quantification.

[0318] To quantify soluble sugars, 10 μl of the sugar extract is added to 990 μl of reaction buffer containing 100 mM imidazole, pH 6.9, 5 mM MgCl₂, 2 mM NADP, 1 mM ATP, and 2 units 2 ml⁻¹ of Glucose-6-P-dehydrogenase. For enzymatic determination of glucose, fructose, and sucrose, 4.5 units of hexokinase, 1 unit of phosphoglucoisomerase, and 2 μl of a saturated fructosidase solution are added in succession. The production of NADPH is photometrically monitored at a wavelength of 340 nm. Similarly, starch is assayed in 30 μl of the insoluble carbohydrate fraction with a kit from Boehringer Mannheim.

[0319] An example for analyzing the protein content in leaves and seeds can be found by Bradford M. M. (1976, “A rapid and sensitive method for the quantification of microgram quantities of protein using the principle of protein dye binding,” Anal. Biochem. 72:248-254). For quantification of total seed protein, 15-20 seeds are homogenized in 250 μl of acetone in a 1.5-ml polypropylene test tube. Following centrifugation at 16,000 g, the supernatant is discarded and the vacuum-dried pellet is resuspended in 250 μl of extraction buffer containing 50 mM Tris-HCl, pH 8.0, 250 mM NaCl, 1 mM EDTA, and 1% (w/v) SDS. Following incubation for 2 h at 25° C., the homogenate is centrifuged at 16,000 g for 5 min and 200 ml of the supernatant will be used for protein measurements. In the assay, γ-globulin is used for calibration. For protein measurements, Lowry DC protein assay (Bio-Rad) or Bradford-assay (Bio-Rad) is used.

[0320] Enzymatic assays of hexokinase and fructokinase are performed spectropho-tometrically according to Renz et al. (1993, Planta 190:156-165), of phosphogluco-isomerase, ATP-dependent 6-phosphofructokinase, pyrophosphate-dependent 6-phospho-fructokinase, Fructose-1,6-bisphosphate aldolase, triose phosphate isomerase, glyceral-3-P dehydrogenase, phosphoglycerate kinase, phosphoglycerate mutase, enolase, and pyruvate kinase are performed according to Burrell et al. (1994, Planta 194:95-101) and of UDP-Glucose-pyrophosphorylase according to Zrenner et al. (1995, Plant J. 7:97-107).

[0321] Intermediates of the carbohydrate metabolism, like Glucose-1-phosphate, Glucose-6-phosphate, Fructose-6-phosphate, Phosphoenolpyruvate, Pyruvate, and ATP are measured as described in Härtel et al. (1998, Plant Physiol. Biochem. 36:407-417) and metabolites are measured as described in Jelitto et al. (1992, Planta 188:238-244).

[0322] In addition to the measurement of the final seed storage compound (i.e., lipid, starch or storage protein) it is also possible to analyze other components of the metabolic pathways utilized for the production of a desired seed storage compound, such as intermediates and side-products, to determine the overall efficiency of production of the compound (Fiehn et al. 2000, Nature Biotech. 18:1447-1161).

[0323] For example, yeast expression vectors comprising the nucleic acids disclosed herein, or fragments thereof, can be constructed and transformed into using standard protocols. The resulting transgenic cells can then be assayed for alterations in sugar, oil, lipid, or fatty acid contents.

[0324] Similarly, plant expression vectors comprising the nucleic acids disclosed herein, or fragments thereof, can be constructed and transformed into an appropriate plant cell such as Arabidopsis, soybean, rapeseed, rice, maize, wheat, Medicago truncatula, etc., using standard protocols. The resulting transgenic cells and/or plants derived there from can then be assayed for alterations in sugar, oil, lipid or fatty acid contents.

[0325] Additionally, the combinations of sequences disclosed herein, or fragments thereof, can be used to generate knockout mutations in the genomes of various organisms, such as bacteria, mammalian cells, yeast cells, and plant cells (Girke at al. 1998, Plant J. 15:39-48). The resultant knockout cells can then be evaluated for their composition and content in seed storage compounds, and the effect on the phenotype and/or genotype of the mutation. For other methods of gene inactivation include U.S. Pat. No. 6,004,804 “Non-Chimeric Mutational Vectors” and Puttaraju et al. (1999, “Spliceosome-mediated RNA trans-splicing as a tool for gene therapy,” Nature Biotech. 17:246-252).

### Example 12

[0326] Purification of the Desired Products from Transformed Organisms. LMPs can be recovered from plant material by various methods well known in the art. Organs of plants can be separated mechanically from other tissue or organs prior to isolation of the seed storage compound from the plant organ. Following homogenization of the tissue, cellular debris is removed by centrifugation and the supernatant fraction containing the soluble proteins is retained for further purification of the desired compound. If the product is secreted from cells grown in culture, then the cells are removed from the culture by low-speed centrifugation and the supernate fraction is retained for further purification.

[0327] The supernatant fraction from either purification method is subjected to chromatography with a suitable resin, in which the desired molecule is either retained on a chromatography resin, while many of the impurities in the sample are not, or where the impurities are retained by the resin, while the sample is not. Such chromatography steps may be repeated as necessary, using the same or different chromatography resins. One skilled in the art would be well-versed in the selection of appropriate chromatography resins and in their most efficacious application for a particular molecule to be purified. The purified product may be concentrated by filtration or ultrafiltration, and stored at a temperature at which the stability of the product is maximized.

[0328] There is a wide array of purification methods known to the art and the preceding method of purification is not meant to be limiting. Such purification techniques are described, for example, in Bailey J. E. & Ollis D. F. 1986, Biochemical Engineering Fundamentals, McGraw-Hill: New York).

[0329] The identity and purity of the isolated compounds may be assessed by techniques standard in the art. These include high-performance liquid chromatography (HPLC), spectroscopic methods, staining methods, thin layer chromatography, analytical chromatography such as high performance liquid chromatography, NIRS, enzymatic assay, or microbiologically. Such analysis methods are reviewed in: Patek et al. (1994, Appl. Environ. Microbiol. 60:133-140), Malakhova et al. (1996, Biotekhnologiya 11:27-32) and Schmidt et al. (1998, Bioprocess Engineer 19:67-70), Ulmann's Encyclopedia of Industrial Chemistry (1996, Vol. A27, VCH: Weinheim, p. 89-90, p. 521-540, p. 540-547, p. 559-566, 575-581 and p. 581-587) and Michal G. (1999, Biochemical Pathways: An Atlas of Biochemistry and Molecular Biology, John Wiley and Sons; Fallon, A. et al. 1987, Applications of HPLC in Biochemistry in: Laboratory Techniques in Biochemistry and Molecular Biology, vol. 17).

[0330] Those skilled in the art will recognize, or will be able to ascertain using no more than routine experimentation, many equivalents to the specific embodiments of the invention described herein. Such equivalents are intended to be encompassed by the claims to the invention disclosed and claimed herein.

### Example 13

[0331] Transgenic Brassica napus plants have been transformed with a construct C6BF/4 containing 2 expression cassettes. Cassette 1 consists of the seed-specific USP promoter encoded by SEQ ID NO 1004, a RNAi construct encoded by SEQ ID NO 993 and created to down-regulate the expression of the B. napus triacylglycerol (TAG) lipase RDM1, and the OCS terminator encoded by SEQ ID NO 1014. Cassette 2 consists of the seed-specific Napin promoter encoded by SEQ ID NO 1000, the coding sequence of the transcription factor WRINKLED1 from Brassica napus (BnWRI1) encoded by SEQ ID NO 977 and the OCS terminator encoded by SEQ ID NO 1014.

[0332] Transgenic plants were generated as described in Example 7 and selected using a herbicide resistance marker expressed under the control of a constitutive promoter. The transgenic plants have been analyzed at the molecular level for their transgenicity and the copy number of the integrated T-DNA. Through this, 33 independent events were generated. Each plant was duplicated by cutting of the main shoot and placing it in a medium for root setting. The original and the clone plant where then grown in the green house under controlled conditions until they produced sufficient seeds for the oil content determination by NIRS. The same procedure was done with wild-type regenerates that were used as controls for analyzing the effect of the combinatorial seed-specific down-regulation of the TAG lipase and seed-specific overexpression of BnWRI1 gene on the seed oil content.

[0333] In Table 4 the seed oil content of the 33 transgenic events (original and clone) are shown. Furthermore, the average seed oil content of the original and clone was compared to the average seed oil content of all control plants shown in Table 5. In the graph of FIG. 1 the relative oil changes in T1 seeds of all generated transgenic plants compared to the wild type control are shown. 31 out of the 33 generated transgenic events (94%) showed a increase in the seed oil content, ranging from 0.5% to almost 6%.

[0334] In FIG. 2 a seed oil content frequency distribution analysis is illustrated. For this purpose, the events were clustered based on their seed oil content into 1% bins ranging from a seed oil content of 40% to 50% (e.g. bin1=40.5%-41.5%, bin2=41.5%-42.5%, etc.). It can be seen that for the transgenic events the distribution is clearly shifted towards a higher oil content with an average seed oil content of 42.8% in the wild type plants and an average seed oil content of 43.9% in the transgenic events. This represents an average oil content increase of 2.6% with a statistical confidence of 99.99% determined by ANOVA analysis.

[0335] The variation in the seed oil content increase among the different events can be explained by the different expression strength of the RNAi construct and the BnWRI1 gene, which depends strongly on the locus the T-DNA has been integrated. Therefore, the seed oil content of the high performing events will show at least the same increase in the seed oil content in the range of 5%-6% in the next generation. Furthermore, the T1 seed pools represent segregating populations, which still containing null-segregants “diluting” the actual high oil phenotype of at least 25%.

TABLE 1
Plant Lipid Classes

| | |
|---|---|
| Neutral Lipids | Triacylglycerol (TAG) |
| | Diacylglycerol (DAG) |
| | Monoacylglycerol (MAG) |
| Polar Lipids | Monogalactosyldiacylglycerol (MGDG) |
| | Digalactosyldiacylglycerol (DGDG) |
| | Phosphatidylglycerol (PG) |
| | Phosphatidylcholine (PC) |
| | Phosphatidylethanolamine (PE) |
| | Phosphatidylinositol (PI) |
| | Phosphatidylserine (PS) |
| | Sulfoquinovosyldiacylglycerol |

TABLE 2
Common Plant Fatty Acids

| | |
|---|---|
| 16:0 | Palmitic acid |
| 16:1 | Palmitoleic acid |
| 16:3 | Palmitolenic acid |
| 18:0 | Stearic acid |
| 18:1 | Oleic acid |
| 18:2 | Linoleic acid |
| 18:3 | Linolenic acid |
| γ-18:3 | Gamma-linolenic acid* |
| 20:0 | Arachidic acid |
| 20:1 | Eicosenoic acid |
| 22:6 | Docosahexanoic acid (DHA)* |
| 20:2 | Eicosadienoic acid |
| 20:4 | Arachidonic acid (AA)* |
| 20:5 | Eicosapentaenoic acid (EPA)* |
| 22:1 | Erucic acid |

*These fatty acids do not normally occur in plant seed oils, but their production in transgenic plant seed oil is of importance in plant biotechnology.

TABLE 3
Fusion polynucleotides, its genes and their biological activities

| Gene | source | SEQ | Biological activity |
|---|---|---|---|
| Ecb0403 | Escherichia coli | 1 | putative maltodextrin glucosidase |
| Ecb2376 | Escherichia coli K12 | 436 | putative lipoprotein |
| Ecb3457 | Escherichia coli K12 | 450 | putative branched-chain amino acid transport protein |
| c_AtCTR1 | Arabidopsis thaliana | 933 | regulator of ethylene signalling |
| c_AtDGD | Arabidopsis thaliana | 935 | digalactosyldiacylglycerol synthase |
| c_AtHb2 | Arabidopsis thaliana | 937 | non-symbiotic hemoglobin of plant origin |
| c_AtICL | Arabidopsis thaliana | 939 | isocitrate lyase |
| c_AtJb05 | Arabidopsis thaliana | 941 | fatty acid elongase beta-ketoacyl-CoA synthase |
| c_AtJB05_o/ | Arabidopsis thalia- | 943 | fatty acid elongase beta-ketoacyl-CoA synthase |
| | [symbol] | | [symbol] ised for heterologous expression in crops |
| c_AtJB80 | Arabidopsis thaliana | 945 | putative palmitoyl-protein thioesterase |
| c_AtPCT | Arabidopsis thaliana | 947 | putative phosphatidate cytidyltransferase |
| c_Atpk201 | Arabidopsis thaliana | 949 | pyruvate orthophosphate dikinase |
| c_Atpk312 | Arabidopsis thaliana | 951 | glycosyl transferase |
| c_Atpk320 | Arabidopsis thaliana | 953 | hexokinase |
| c_AtPOX | Arabidopsis thaliana | 955 | ascorbate peroxidase |
| c_AtSOD | Arabidopsis thaliana | 957 | superoxide dismutase |
| c_AtSusy | Arabidopsis thaliana | 959 | Sucrose synthase |
| c_AtWri1 | Arabidopsis thaliana | 961 | WRINKLED1 transcription factor |
| c_Bn079 | Brassica napus | 963 | bZIP transcription factor |
| c_BnCTR1 | Brassica napus | 965 | regulator of ethylene signalling |
| c_BnCTR1_{—} | Brassica na- | 967 | regulator of ethylene signalling, |
| | [symbol] c | | [symbol] ised for heterologous expression in crops |
| c_BnDGD | Brassica napus | 969 | digalactosyldiacylglycerol synthase |
| c_BnDGD_o | Brassica na- | 971 | digalactosyldiacylglycerol synthase, |
| | [symbol] c | | [symbol] ised for heterologous expression in crops |
| c_BnPCT | Brassica napus | 973 | putative phosphatidate cytidyltransferase |
| c_BnSusy | Brassica napus | 975 | Sucrose synthase |
| c_BnWri1 | Brassica napus | 977 | WRINKLED1 transcription factor |
| c_BnWri_o/ | Brassica na- | 979 | WRINKLED1 transcription factor, |
| | [symbol] c | | [symbol] ised for heterologous expression in crops |
| c_EcGIgC3 | Escherichia coli | 981 | ADP-glucose pyrophosphorylase |
| c_HaOsw24 | Helianthus annuus | 983 | putative diacylglycerol binding protein |
| c_PpCK_pp | Physcomitrella patens | 985 | putative casein kinase |
| c_ScG3PDH | Saccharomyces cerevi- | 987 | glycerol-3-phosphate dehydrogenase |
| c_ScSLC1 | Saccharomyces cerevi- | 989 | acylglyceride fatty acyltransferase |
| c_ScYIL150 | Saccharomyces cerevi- | 991 | chromatin-associated protein |
| dr_BnRdm1 | synthetic construct | 993 | RNAi construct against sdp1 lipase |
| p_BnGLP | Brassica napus | 994 | Promoter |
| p_BnOleosin | Brassica napus | 995 | Promoter |
| p_Conlinin | Linum usitatissimum | 996 | Promoter |
| p_Leb4 | Vicia faba | 997 | Promoter |
| p_LuPXR | Linum usitatissimum | 998 | Promoter |
| p_LuPXR17 | Linum usitatissimum | 999 | Promoter |
| p_NapinA | Brassica napus | 1000 | Promoter |
| p_SBP1000 | Vicia faba | 1001 | Promoter |
| p_VfSBP | Vicia faba | 1002 | Promoter |
| p_STPT | Arabidopsis thaliana | 1003 | Promoter |
| p_USP | Vicia faba | 1004 | Promoter |
| p_Vicillin_pV | Vicia faba | 1005 | Promoter |
| tp_rbcS | Pisum sativum | 1006 | targetting sequence |
| t_AtGLP | Arabidopsis thaliana | 1007 | terminator |
| t_AtPXR | Arabidopsis thaliana | 1008 | terminator |
| t_AtSACPD | Arabidopsis thaliana | 1009 | terminator |
| t_AtTip | Arabidopsis thaliana | 1010 | terminator |
| t_CaMV35S | Cauliflower mosaic virus | 1011 | terminator |
| t_CatPA | Solanum tuberosum | 1012 | terminator |
| t_Leb3 | Vicia faba | 1013 | terminator |
| t_OCS | Agrobacterium tumefa- | 1014 | terminator |
| t_rbcSE9 | Pisum sativum | 1015 | terminator |
| c_AtICL_GA | Arabidopsis thalia- | 1016 | isocitrate lyase, codon optimised for heterologous expression |
| | [symbol] c | | |
| c_BnPCT_G | Brassica na- | 1018 | putative phosphatidate cytidyltransferase, codon optimised for |
| | [symbol] c | | [symbol] s expression in crops |
| c_BnSuSy_{—} | Brassica na- | 1020 | Sucrose synthase, codon optimised for heterologous express |
| | [symbol] c | | |
| c_PpCK_pp | Physcomitrella pa- | 1022 | putative casein kinase, codon optimised for heterologous ex- |
| | tic | | crops |
| c_ScG3PDH | Saccharomyces cerevi- | 1024 | glycerol-3-phosphate dehydrogenase, codon optimised for |
| | tic | | [symbol] s expression in crops |

[symbol]

indicates data missing or illegible when filed

Batch 4

| | | Cassette: | | | | | | | | |
|---|---|---|---|---|---|---|---|---|---|---|
| | | A | | | | | | B reverse | | |
| LIMS | | Pro- | Seq | | Seq | | Seq | | Seq | |
| Name | genes | moter | ID | gene | ID | Term | ID | Term | ID | gene |
| C4BR/1 | 2 | USP | 1004 | JB05 | 941 | t- | 1011&1014 | LeB3 | 1013 | ICL |
| | | | | | | CaMV35S&OCS | | | | |
| C4BR/2 | 3 | SBP1000 | 1001 | Atdgd | 935 | OCS | 1014 | LeB3 | 1013 | ScSLC1 |
| C4BR/3 | 3 | USP | 1004 | Atsusy | 959 | t- | 1011&1014 | LeB3 | 1013 | ICL |
| | | | | | | CaMV35S&OCS | | | | |
| C4BR/4 | 3 | USP | 1004 | c-AtCTR1 | 933 | t- | 1011&1014 | LeB3 | 1013 | ICL |
| | | | | | | CaMV35S&OCS | | | | |
| C4BR/5 | 3 | USP | 1004 | BnDGD | 969 | t- | 1011&1014 | LeB3 | 1013 | BnWRI1 |
| | | | | | | CaMV35S&OCS | | | | |
| C4BR/6 | 3 | USP | 1004 | ScSLC1 | 989 | t- | 1011&1014 | LeB3 | 1013 | ICL |
| | | | | | | CaMV35S&OCS | | | | |
| C4BR/7 | 3 | USP | 1004 | rbcS- | 1006&981 | OCS | 1014 | LeB3 | 1013 | susy |
| | | | | EcglgC3 | | | | | | |
| C4BR/8 | 3 | USP | 1004 | JB80 | 945 | t-CaMV35ST | 1011 | OCS | 1014 | PCT |
| C4BR/9 | 3 | USP | 1004 | pk312 | 951 | t-CaMV35S | 1011 | OCS | 1014 | pk320 |
| C4BR/10 | 3 | USP | 1004 | rbcS- | 1006&981 | OCS | 1014 | LeB3 | 1013 | ICL |
| | | | | EcglgC3 | | | | | | |
| C4BR/11 | 3 | USP | 1004 | AtHb2 | 937 | t- | 1011&1014 | LeB3 | 1013 | AtPOX |
| | | | | | | CaMV35S&OCS | | | | |

Batch 4

| | | Cassette: | | | | | | | | |
|---|---|---|---|---|---|---|---|---|---|---|
| | | B reverse | | | C | | | | | |
| LIMS | | Seq | Pro- | Seq | Pro- | Seq | | Seq | | Seq |
| Name | genes | ID | moter | ID | moter | ID | gene | ID | Term | ID |
| C4BR/1 | 2 | 939 | LeB4 | 997 | | | | | | |
| C4BR/2 | 3 | 989 | LeB4 | 997 | USP | 1004 | JB05 | 941 | t- | 1011 |
| | | | | | | | | | CaMV35S | |
| C4BR/3 | 3 | 939 | LeB4 | 997 | SBP1000 | 1001 | ScG3PDH | 987 | E9 | 1015 |
| C4BR/4 | 3 | 939 | LeB4 | 997 | SBP1000 | 1001 | PCT | 947 | E9 | 1015 |
| C4BR/5 | 3 | 977 | LeB4 | 997 | SBP1000 | 1001 | Bn079 | 963 | E9 | 1015 |
| C4BR/6 | 3 | 939 | LeB4 | 997 | SBP1000 | 1001 | ScG3PDH | 987 | E9 | 1015 |
| C4BR/7 | 3 | 959 | LeB4 | 997 | SBP1000 | 1001 | ScG3PDH | 987 | E9 | 1015 |
| C4BR/8 | 3 | 947 | SBP1000 | 1001 | LuPXR | 998 | HaOsw24 | 983 | E9 | 1015 |
| C4BR/9 | 3 | 953 | SBP1000 | 1001 | LuPXR | 998 | pk201 | 949 | E9 | 1015 |
| C4BR/10 | 3 | 939 | LeB4 | 997 | LuPXR | 998 | pk201 | 949 | E9 | 1015 |
| C4BR/11 | 3 | 955 | LeB4 | 997 | SBP1000 | 1001 | AtSOD | 957 | E9 | 1015 |

BATCH 5

| | | Cassette: | | | | | | | | |
|---|---|---|---|---|---|---|---|---|---|---|
| | | A | | | | | | B reverse | | |
| LIMS | | Pro- | Seq | | Seq | | Seq | | Seq | |
| Name | genes | moter | ID | gene | ID | Term | ID | Term | ID | gene |
| C5BR/1 | 3 | USP | 1004 | BnWRI1 | 977 | OCS | 1014 | t-Leb3 | 1013 | BnCTR1 |
| C5BR/2 | 3 | USP | 1004 | BnWRI1 | 977 | OCS | 1014 | t- | 1011 | AtJB05 |
| | | | | | | | | CaMV35S | | |
| C5BR/3 | 3 | BnGLP | 994 | Ecb3457 | 450 | AtGLP | 1007 | t-AtPXR | 1008 | rbcs_Ecb2376 |
| C5BR/4 | 3 | USP | 1004 | AtWRI1 | 961 | OCS | 1014 | t- | 1011 | AtJB05 |
| | | | | | | | | CaMV35S | | |
| C5BR/5 | 3 | STPT | 1003 | BnWRI1 | 977 | AtSACPD | 1009 | t-AtPXR | 1008 | BnSusy |
| C5BR/6 | 3 | USP | 1004 | BnDGD | 969 | t-CaMV35S | 1011 | LeB3 | 1013 | BnWRI1 |
| C5BR/7 | 3 | USP | 1004 | AtHb2 | 937 | t-CaMV35S | 1011 | LeB3 | 1013 | AtPOX |
| C5BR/1 | 3 | USP | 1004 | BnSusy | 975 | OCS | 1014 | LeB3 | 1013 | ICL |

BATCH 5

| | | Cassette: | | | | | | | | |
|---|---|---|---|---|---|---|---|---|---|---|
| | | B reverse | | | C | | | | | |
| LIMS | | Seq | Pro- | Seq | Pro- | Seq | | Seq | | Seq |
| Name | genes | ID | moter | ID | moter | ID | gene | ID | Term | ID |
| C5BR/1 | 3 | 965 | LeB4 | 997 | SBP1000 | 1001 | BnDGD | 969 | rbcsE9 | 1015 |
| C5BR/2 | 3 | 941 | Vicillin | 997 | SBP1000 | 1001 | ScG3PDH | 987 | rbcsE9 | 1015 |
| C5BR/3 | 3 | 1006&436 | LuPXR1727 | 999 | USP | 1004 | rbcs_Ecb0403 | 1006&1 | OCS | 1014 |
| C5BR/4 | 3 | 941 | Vicillin | 1005 | LuPXR1727 | 999 | ScG3PDH | 987 | AtPXR | 1008 |
| C5BR/5 | 3 | 975 | LuPXR1727 | 999 | USP | 1004 | BnWRI1 | 977 | t- | 1011 |
| | | | | | | | | | CaMV35S | |
| C5BR/6 | 3 | 977 | LeB4 | 997 | LuPXR1727 | 999 | Bn079 | 963 | AtPXR | 1008 |
| C5BR/7 | 3 | 955 | LeB4 | 997 | BnGLP | 994 | AtSOD | 957 | AtGLP | 1007 |
| C5BR/1 | 3 | 939 | LeB4 | 997 | LuPXR1727 | 999 | ScG3PDH | 987 | AtPXR | 1008 |

| | | Cassette: | | | | | | | | |
|---|---|---|---|---|---|---|---|---|---|---|
| | | A | | | | | | B forward | | |
| LIMS | | Pro- | Seq | | Seq | | Seq | Pro- | Seq | |
| Name | genes | moter | ID | gene | ID | Term | ID | moter | ID | gene |
| C5BF/1 | 3 | USP | 1004 | JB80 | 945 | OCS | 1014 | BnGLP | 994 | BnPCT |
| C5BF/2 | 3 | USP | 1004 | rbcS- | 1006&981 | OCS | 1014 | BnGLP | 994 | BnSusy |
| | | | | EcglgC3 | | | | | | |
| C5BF/3 | 3 | BnGLP | 994 | pk312 | 951 | AtGLP | 1007 | USP | 1004 | pk320 |
| C5BF/4 | 2 | | | | | | | NapinA | 1000 | AtCTR1 |
| C5BF/5 | 2 | | | | | | | NapinA | 1000 | JB05 |
| C5BF/6 | 2 | | | | | | | NapinA | 1000 | AtICL |
| C5BF/7 | 2 | | | | | | | NapinA | 1000 | BnSuSy |
| C5BF/8 | 2 | | | | | | | NapinA | 1000 | ScG3PDH |

| | | Cassette: | | | | | | | | |
|---|---|---|---|---|---|---|---|---|---|---|
| | | B forward | | | C | | | | | |
| LIMS | | Seq | | Seq | Pro- | Seq | | Seq | | Seq |
| Name | genes | ID | Term | ID | moter | ID | gene | ID | Term | ID |
| C5BF/1 | 3 | 973 | AtGLP | 1007 | LuPXR1727 | 999 | HaOsw24 | 983 | rbcsE9 | 1015 |
| C5BF/2 | 3 | 975 | AtGLP | 1007 | LuPXR1727 | 999 | ScG3PDH | 987 | AtPXR | 1008 |
| C5BF/3 | 3 | 953 | t- | 1011 | LuPXR1727 | 999 | pk201 | 949 | rbcsE9 | 1015 |
| | | | CaMV35S | | | | | | | |
| C5BF/4 | 2 | 933 | OCS | 1014 | NapinA | 1000 | BnWRI1 | 977 | OCS | 1014 |
| C5BF/5 | 2 | 941 | OCS | 1014 | NapinA | 1000 | BnWRI1 | 977 | OCS | 1014 |
| C5BF/6 | 2 | 939 | OCS | 1014 | NapinA | 1000 | BnWRI1 | 977 | OCS | 1014 |
| C5BF/7 | 2 | 975 | OCS | 1014 | NapinA | 1000 | BnWRI1 | 977 | OCS | 1014 |
| C5BF/8 | 2 | 987 | OCS | 1014 | NapinA | 1000 | BnWRI1 | 977 | OCS | 1014 |

BATCH 6

| | | Cassette: | | | | | | | | |
|---|---|---|---|---|---|---|---|---|---|---|
| | | A | | | | | | | | |
| LIMS | | Pro- | Seq | Trait | Seq | Ter- | Seq | Pro- | Seq | Trait |
| Name | genes | moter | ID | Gene | ID | minator | ID | moter | ID | Gene |
| C6BF/1 | 3 | USP | 1004 | pk312 | 951 | t-CaMV35S | 1011 | NapinA | 1000 | pk320 |
| C6BF/2 | 3 | USP | 1004 | JB80 | 945 | OCS | 1014 | NapinA | 1000 | ScG3PDH |
| C6BF/3 | 3 | LeB4 | 997 | BnWRI1 | 977 | leb3 | 1013 | BnGLP | 994 | BnSuSy |
| C6BF/4 | 2 | USP | 1004 | BnRdm1_RNAi | 993 | OCS | | | | |

BATCH 6

| | | Cassette: | | | | | | | | |
|---|---|---|---|---|---|---|---|---|---|---|
| | | | | | C | | | | | |
| LIMS | | Seq | Ter- | Seq | Pro- | Seq | | Seq | Ter- | Seq |
| Name | genes | ID | minator | ID | moter | ID | Trait Gene | ID | minator | ID |
| C6BF/1 | 3 | 953 | OCS | 1014 | LuPXR | 998 | pk201 | 949 | rbcsE9 | 1015 |
| C6BF/2 | 3 | 987 | OCS | 1014 | NapinA | 1000 | AtICL | 939 | OCS | 1014 |
| C6BF/3 | 3 | 975 | AtGLP | 1007 | pNapinA | 1000 | ScYIL150c | 991 | OCS | 1014 |
| C6BF/4 | 2 | | | | NapinA | 1000 | BnWRI1 | 977 | OCS | 1014 |

| | | Cassette: | | | | | | | | |
|---|---|---|---|---|---|---|---|---|---|---|
| | | A | | | | | | B reverse | | |
| LIMS | | Pro- | Seq | | Seq | | Seq | | Seq | |
| Name | genes | moter | ID | gene | ID | Term | ID | Term | ID | gene |
| C6BR/1 | 3 | USP | 1004 | BnDGD | 969 | t-CaMV35S | 1011 | LeB3 | 1013 | BnWRI1 |
| C6BR/2 | 3 | USP | 1004 | BnDGD | 969 | t-CaMV35S | 1011 | LeB3 | 1013 | BnWRI1 |
| C6BR/3 | 3 | USP | 1004 | BnDGD | 969 | OCS | 1014 | LeB3 | 1013 | BnWRI1 |
| C6BR/4 | 3 | USP | 1004 | BnWRI1 | 977 | OCS | 1014 | LeB3 | 1013 | PpCK_pp63 |
| C6BR/5 | 3 | STPT | 1003 | BnWRI1 | 977 | CatpA | 1012 | t- | 1011 | BnDGD |
| | | | | | | | | CaMV35S | | |
| C6BR/6 | 3 | USP | 1004 | rbcS- | 1006&981 | OCS | 1014 | AtGLP | 1007 | PpCK_pp63 |
| | | | | EcglgC3 | | | | | | |

| | | Cassette: | | | | | | | | |
|---|---|---|---|---|---|---|---|---|---|---|
| | | | | | C | | | | | |
| LIMS | | Seq | Pro- | Seq | Promo- | Seq | | Seq | | Seq |
| Name | genes | ID | moter | ID | ter | ID | gene | ID | Term | ID |
| C6BR/1 | 3 | 977 | LeB4 | 997 | NapinA | 1000 | ScG3PDH | 987 | OCS | 1014 |
| C6BR/2 | 3 | 977 | LeB4 | 997 | NapinA | 1000 | ScG3PDH | 987 | OCS | 1014 |
| C6BR/3 | 3 | 977 | LeB4 | 997 | pBnGLP | 994 | HaOsw24 | 983 | AtGLP | 1007 |
| C6BR/4 | 3 | 985 | LeB4 | 997 | pNapinA | 1000 | ScG3PDH | 987 | OCS | 1014 |
| C6BR/5 | 3 | 969 | USP | 1004 | pNapinA | 1000 | ScYIL150c | 991 | OCS | 1014 |
| C6BR/6 | 3 | 985 | BnGLP | 994 | pNapinA | 1000 | BnWRI1 | 977 | OCS | 1014 |

Synthetic 9ner

| | | Cassette: | | | | | | | | |
|---|---|---|---|---|---|---|---|---|---|---|
| | | A reverse | | | | | | B reverse | | |
| LIMS | | | Seq | | Seq | Pro- | Seq | | Seq | |
| Name | genes | Term | ID | | ID | moter | ID | Term | ID | |
| C6/9syn | 9 | t-AtTIP | 1010 | AtJB05/oGM | 943 | p- | 996 | t- | 1011 | c_PpCK_pp63_GA |
| | | | | | | Conlinin | | CaMV35S | | |

Synthetic 9ner

| | | Cassette: | | | | | | | | |
|---|---|---|---|---|---|---|---|---|---|---|
| | | B reverse | | | C reverse | | | | | |
| LIMS | | Seq | Pro- | Seq | | Seq | | Seq | Pro- | Seq |
| Name | genes | ID | moter | ID | Term | ID | | ID | moter | ID |
| C6/9syn | 9 | 1022 | p- | 1000 | t-AtPXR | 1008 | BnDGD_o/GM | 971 | LuPXR1727 | 999 |
| | | | NapinA | | | | | | | |

Synthetic 9ner

| | | Cassette: | | | | | | | | |
|---|---|---|---|---|---|---|---|---|---|---|
| | | D reverse | | | | | | E reverse | | |
| LIMS | | | Seq | | Seq | Pro- | Seq | | Seq | |
| Name | genes | Term | ID | | ID | moter | ID | Term | ID | |
| C6/9syn | 9 | t- | 1015 | c_ScG3PDH_GA | 1024 | pVfSBP | 1002 | t-Leb3 | 1013 | BnCtr1_o/GM |
| | | rbcsE9 | | | | | | | | |

Synthetic 9ner

| | | Cassette: | | | | | | | | |
|---|---|---|---|---|---|---|---|---|---|---|
| | | E reverse | | | F forward | | | | | |
| LIMS | | Seq | Pro- | Seq | Pro- | Seq | | Seq | | Seq |
| Name | genes | ID | moter | ID | moter | ID | | ID | Term | ID |
| C6/9syn | 9 | 967 | Leb4 | 997 | p- | 994 | c_BnSuSy_GA | 1020 | t-AtGLP | 1007 |
| | | | | | BnGLP | | | | | |

Synthetic 9ner

| | | Cassette: | | | | | | | | |
|---|---|---|---|---|---|---|---|---|---|---|
| | | G forward | | | | | | H forward | | |
| LIMS | | Pro- | Seq | | Seq | | Seq | Pro- | Seq | |
| Name | genes | moter | ID | | ID | Term | ID | moter | ID | |
| C6/9syn | 9 | pVfVic | 1005 | c_BnPCT_GA | 1018 | OCS | 1014 | p- | 995 | c_AtICL_GA |
| | | | | | | | | BnOleo- | | |
| | | | | | | | | sin | | |

Synthetic 9ner

| | | Cassette: | | | | | | | | |
|---|---|---|---|---|---|---|---|---|---|---|
| | | H forward | | | I forward | | | | | |
| LIMS | | Seq | | Seq | Pro- | Seq | | Seq | | Seq |
| Name | genes | ID | Term | ID | moter | ID | | ID | Term | ID |
| C6/9syn | 9 | 1016 | t-CatpA | 1012 | p-USP | 1004 | BnWri/oGM | 979 | t- | 1004 |
| | | | | | | | | | At- | |
| | | | | | | | | | SACPD4 | |

TABLE 4
Oil content in transgenic plants engineered to seed-specifically down
regulate the TAG lipase encoded by SEQ ID NO: 993 and over
express the BnWRI1 gene encoded by SEQ ID NO: 997.

| | | | Average | |
|---|---|---|---|---|
| Event | Plant | Oil content | Oil Content | Relative Change |
| Event 006 | original | 43.7 | 43.6 ± 0.1 | 1.9% |
| | clone | 43.5 | | |
| Event 008 | original | 45.4 | 44.6 ± 1.1 | 4.3% |
| | clone | 43.8 | | |
| Event 011 | original | 44.3 | 43.7 ± 0.7 | 2.2% |
| | clone | 43.2 | | |
| Event 015 | original | 43.1 | 43.2 ± 0.0 | 0.9% |
| | clone | 43.2 | | |
| Event 025 | original | 43.8 | 43.7 ± 0.1 | 2.2% |
| | clone | 43.7 | | |
| Event 026 | original | 43.7 | 43.4 ± 0.4 | 1.5% |
| | clone | 43.1 | | |
| Event 042 | original | 42.8 | 42.5 ± 0.4 | −0.8% |
| | clone | 42.2 | | |
| Event 043 | original | 45.0 | 44.7 ± 0.3 | 4.6% |
| | clone | 44.5 | | |
| Event 044 | original | 45.2 | 44.7 0.7 | 4.6% |
| | clone | 44.3 | | |
| Event 046 | original | 43.6 | 43.4 ± 0.2 | 1.5% |
| | clone | 43.2 | | |
| Event 047 | original | 44.6 | 44.6 0.0 | 4.2% |
| | clone | 44.6 | | |
| Event 049 | original | 45.0 | 44.9 ± 0.0 | 5.1% |
| | clone | 44.9 | | |
| Event 051 | original | 43.6 | 44.2 ± 0.8 | 3.4% |
| | clone | 44.8 | | |
| Event 053 | original | | 45.1 ± 0.0 | 5.4% |
| | clone | 45.1 | | |
| Event 054 | original | 45.6 | 45.0 ± 0.9 | 5.1% |
| | clone | 44.3 | | |
| Event 058 | original | 43.5 | 43.3 ± 0.2 | 1.2% |
| | clone | 43.1 | | |
| Event 059 | original | 44.7 | 44.6 ± 0.1 | 4.4% |
| | clone | 44.6 | | |
| Event 061 | original | 44.5 | 43.9 ± 0.9 | 2.5% |
| | clone | 43.2 | | |
| Event 063 | original | 45.7 | 44.4 ± 1.8 | 3.8% |
| | clone | 43.1 | | |
| Event 064 | original | 44.2 | 44.1 ± 0.2 | 3.0% |
| | clone | 43.9 | | |
| Event 068 | original | 42.3 | 43.0 ± 1.0 | 0.6% |
| | clone | 43.8 | | |
| Event 070 | original | 44.2 | 44.2 ± 0.0 | 3.4% |
| | clone | | | |
| Event 079 | original | 43.7 | 43.7 ± 0.1 | 2.1% |
| | clone | 43.7 | | |
| Event 082 | original | | 43.5 ± 0.0 | 1.6% |
| | clone | 43.5 | | |
| Event 084 | original | 43.5 | 43.9 ± 0.6 | 2.7% |
| | clone | 44.4 | | |
| Event 111 | original | 44.5 | 44.1 ± 0.5 | 3.1% |
| | clone | 43.7 | | |
| Event 127 | original | 44.0 | 43.8 ± 0.3 | 2.5% |
| | clone | 43.6 | | |
| Event 133 | original | 44.1 | 44.2 ± 0.1 | 3.2% |
| | clone | 44.2 | | |
| Event 148 | original | 43.2 | 43.4 ± 0.3 | 1.4% |
| | clone | 43.6 | | |
| Event 149 | original | | 43.7 0.0 | 2.1% |
| | clone | 43.7 | | |
| Event 185 | original | 42.6 | 42.6 0.0 | −0.3% |
| | clone | | | |
| Event 208 | original | 42.7 | 43.0 0.4 | 0.5% |
| | clone | 43.3 | | |
| Event 209 | original | 43.2 | 43.2 ± 0.0 | 1.1% |
| | clone | | | |

TABLE 5
Seed oil content Brassica napus cv. Kumily used as controls
to determine oil changes in the transgenic plants.

| Event | Plant | Oil content | Average Oil Content |
|---|---|---|---|
| WT 10 | original | 43.2 | 42.8 ± 0.5 |
| | clone | 42.5 | |
| WT 11 | original | 42.6 | 42.4 ± 0.3 |
| | clone | 42.2 | |
| WT 15 | original | 42.9 | 43.1 ± 0.3 |
| | clone | 43.2 | |
| WT 5 | original | 42.8 | 42.9 ± 0.1 |
| | clone | 42.9 | |

The application's sequence listing, which the Patent Office published only in electronic form, follows.

SEQUENCE LISTING (1025 sequences)

SEQ ID NO: 1 - DNA, 1818 bp, Escherichia coli
  CDS (1)..(1818)
atgatgttaaatgcatggcacctgccggtgcccccatttgttaaacaaagcaaagatcaactgctcattacactgtggctgacgggcgaagacccaccgcagcgcattatgctgcgtacagaacacgataacgaagaaatgtcagtaccgatgcataagcagcgcagtcagccgcagcctggcgtcaccgcatggcgtgcggcgattgatctctccagcggacaaccccggcggcgttacagtttcaaactgctgtggcacgatcgccagcgttggtttacaccgcagggcttcagccgaatgccgccggcacgactggagcagtttgccgtcgatgtaccggatatcggcccacaatgggctgcggatcagattttttatcagatcttccctgatcgttttgcgcgtagtcttcctcgtgaagctgaacaggatcatgtctattaccatcatgcagccggacaagagatcatcttgcgtgactgggatgaaccggtcacggcgcaggcgggcggatcaacgttctatggcggcgatctggacgggataagcgaaaaactgccgtatctgaaaaagcttggcgtgacagcgctgtatctcaatccggtgtttaaagctcccagcgtacataaatacgataccgaggattatcgccatgtcgatccgcagtttggcggtgatggggcgttgctgcgtttgcgacacaatacgcagcagctgggaatgcggctggtgctggacggcgtgtttaaccacagtggcgattcccatgcctggtttgacaggcataatcgtggcacgggtggtgcttgtcacaaccccgaatcgccctggcgcgactggtactcgtttagtgatgatggcacggcgctcgactggcttggctatgccagcttgccgaagctggattatcagtcggaaagtctggtgaatgaaatttatcgcggggaagacagtattgtccgccactggctgaaagcgccgtggaatatggacggctggcggctggatgtggtgcatatgctgggggaggcgggtggggcgcgcaataatatgcagcacgttgccgggatcaccgaagcggcgaaagaaacccagccggaagcgtatattgtcggcgaacattttggcgatgcacggcaatggttacaggccgatgtggaagatgccgccatgaactatcgtggcttcacattcccgttgtggggatttcttgccaataccgatatctcttacgatccgcagcaaattgatgcccaaacctgtatggcctggatggataattaccgcgcagggctttctcatcaacaacaattacgtatgtttaatcagctcgacagccacgatactgcgcgatttaaaacgctgctcggtcgggatattgcgcgcctgccgctggcggtggtctggctgttcacctggcctggtgtaccgtgcatttattacggtgatgaagtaggactggatggcaaaaacgatccgttttgccgtaaaccgttcccctggcaggtggaaaagcaggatacggcgttattcgcgctgtaccagcgaatgattgcgctgcgtaagaaaagtcaggcgctacgtcatggcggctgtcaggtgctgtatgcggaagataacgtggtggtatttgtccgcgtgctgaatcagcaacgtgtactggtggcaatcaaccgtggcgaggcctgtgaagtggtgctacccgcgtcaccgtttctcaatgccgtgcaatggcaatgcaaagaagggcatgggcaactgactgacgggattctggctttgcctgccatttcggctacggtatggatgaactaa

SEQ ID NO: 2 - protein, 605 aa, Escherichia coli
MMLNAWHLPVPPFVKQSKDQLLITLWLTGEDPPQRIMLRTEHDNEEMSVPMHKQRSQPQPGVTAWRAAIDLSSGQPRRRYSFKLLWHDRQRWFTPQGFSRMPPARLEQFAVDVPDIGPQWAADQIFYQIFPDRFARSLPREAEQDHVYYHHAAGQEIILRDWDEPVTAQAGGSTFYGGDLDGISEKLPYLKKLGVTALYLNPVFKAPSVHKYDTEDYRHVDPQFGGDGALLRLRHNTQQLGMRLVLDGVFNHSGDSHAWFDRHNRGTGGACHNPESPWRDWYSFSDDGTALDWLGYASLPKLDYQSESLVNEIYRGEDSIVRHWLKAPWNMDGWRLDVVHMLGEAGGARNNMQHVAGITEAAKETQPEAYIVGEHFGDARQWLQADVEDAAMNYRGFTFPLWGFLANTDISYDPQQIDAQTCMAWMDNYRAGLSHQQQLRMFNQLDSHDTARFKTLLGRDIARLPLAVVWLFTWPGVPCIYYGDEVGLDGKNDPFCRKPFPWQVEKQDTALFALYQRMIALRKKSQALRHGGCQVLYAEDNVVVFVRVLNQQRVLVAINRGEACEVVLPASPFLNAVQWQCKEGHGQLTDGILALPAISATVWMN

SEQ ID NO: 3 - DNA, 1665 bp, Mesorhizobium loti MAFF303099
  CDS (1)..(1665): transl_table=11
atgcaatccgctttgaaagccagttcgaaccccgacctcgccatcgatcgcgactggtggcgaggtgctgtcatctaccagatctacccgcgcagctaccaggattcgaacggcgacggcatcggcgacctcaagggcatcatcgaacggctgccctacatcgcagcgctcggtgcggacgccatctggatctcgcccttcttcaaatcgccgatgaaggatttcggctacgacgtctcggactattgcgacgtcgacccgatgttcggcacgctggccgatttcgacgcgctgacggcggaggcgcaccggctgggtctcaaggtgatgatcgacgaagtgctgtcgcacacggccgacatccatccctggttcaaggaaagccggtcgagccgcagcaatcccaaggccgactggtatgtctgggcggacgcccggcccgacggcaccccgcccaacaactggctgtcgatcttcggcgggtccgcctggcagtgggacaccagccgccagcaatattacctgcacaatttcctggccgagcagcccgacctcaacttccacaaccgcgaagtccaggacgcgctgctcgacgtcacccgcttctggctggaacgcggcgtcgacggcttccgcctcgacacgatcaatttctactttcacagccagggcctggaaaacaatccgccgctgccgccggaagaacgcaacgaccagaccgcgccggcggtcaatccctacaactaccaggaccatctctacgacaagagccgtccggaaaacctcggcttcctcgaacgcttccgcgctttgctcgacgaatatccggcaaccgccgctgtcggcgaggtcggcgattcgcagcgtgggctggaagtcgtggcagcctacactgccggcggcaagcgcgtgcatatgtgttattccttcgacttcctggcgccggaaaagatcagcgccgccaaggtgcgttcggtgctggaggccttcggcaaggtcgccagcgacggctggtcgtgctgggcgttttccaatcatgacgtgatgcgtccggcctcgcgctgggccgccggcgaagccgaccctgtcgcctatctcaaggtcatctcggccttgctgatgtcgctgcgcggctcggtctgcatctaccagggcgaggaactcgggctgggcgaggccgaattgcgcttcgaggatctgcaggatccctatggcatccgcttctggccggaattcaagggccgcgacggctgccgcacgcccatggtgtgggatggcgacgccaagaatggcggcttctcccaggccaagccctggctgccggtgccggccaagcatctggcgcaagcggtcaatgtccagcagggtgaccaggcttcactgctcgagcactatcggcgcttcctcagcttccgccgcgcccatccggcgctggccaagggcgacatcaccttcatcgaaagcgagggcgacaccgtcgccttcacgcgccgcgccggcaacgagcaggttgtctgcgtcttcaacctcggcgccaagccggccaaggttgaccttggcagccgatccctgcaacctttgccgggacacgggttttccgggcaggcgaggcccggttcgatcgagcttggcggttacggcgcctggttcgggcgcatcgactga

SEQ ID NO: 4 - protein, 554 aa, Mesorhizobium loti MAFF303099
MQSALKASSNPDLAIDRDWWRGAVIYQIYPRSYQDSNGDGIGDLKGIIERLPYIAALGADAIWISPFFKSPMKDFGYDVSDYCDVDPMFGTLADFDALTAEAHRLGLKVMIDEVLSHTADIHPWFKESRSSRSNPKADWYVWADARPDGTPPNNWLSIFGGSAWQWDTSRQQYYLHNFLAEQPDLNFHNREVQDALLDVTRFWLERGVDGFRLDTINFYFHSQGLENNPPLPPEERNDQTAPAVNPYNYQDHLYDKSRPENLGFLERFRALLDEYPATAAVGEVGDSQRGLEVVAAYTAGGKRVHMCYSFDFLAPEKISAAKVRSVLEAFGKVASDGWSCWAFSNHDVMRPASRWAAGEADPVAYLKVISALLMSLRGSVCIYQGEELGLGEAELRFEDLQDPYGIRFWPEFKGRDGCRTPMVWDGDAKNGGFSQAKPWLPVPAKHLAQAVNVQQGDQASLLEHYRRFLSFRRAHPALAKGDITFIESEGDTVAFTRRAGNEQVVCVFNLGAKPAKVDLGSRSLQPLPGHGFSGQARPGSIELGGYGAWFGRID

SEQ ID NO: 5 - DNA, 1635 bp, Mesorhizobium loti MAFF303099
  CDS (1)..(1635): transl_table=11
gtgatggccgacgacaatgcggggcagggggccgactggtggcgcggctgcgtcatctaccaagtctatccgcgttccttccaggacacgaccggcgacggcagcggcgatcttaggggtatcaccacgcggcttggccacatcgcttcgctcggcgtcgatgccgtctggctgtcgcccttcttcaagtcgccaatggccgacatgggctatgacgtttcggattatcgcgacgtcgatccgatgttcggttcacttgaggatttcgacgctctggtcaccgaggcgcaccggttgggcctgaaggtcgtcatcgaccaggtcttgtcgcactcatccgacaagcacgaatggttcgtccaaagccgcgccagccgcgacaatcccaaggctgactggtacgtctgggccgatacgaaacccgacggcaacgcgcccaacaactggctgtccgtcttcggcggcccggcctgggagtgggattcgacccgccggcaatattacatgcacaatttcctcgcctcgcagcccgatctgaatttccacaatccagaggtccaggatgcgctgctggacacggtgcgcttctggctggagcgtggcgtcgacggttttcggctcgatacggtcaactactatgtccacgaccgctggctgcgcagcaatccgccgctggcgtcgagcgtcgccggcaccaatggcgagaccaacacctacctctaccaggagcatctgttcgacaagacgcagccggaaaacctggctttcctcaggcgtttccgggggttgctagacgaatatcccgaccgcgccgccgtcggcgaaatcggcgatgagggccgctcgctgcagacgctggctgcctacacctccggcggcgacaagctgcagatgtgctacaccttcgacctgctcggcccgcagttttcggcggcgcatgtgcgcggctgcgtcgaggccttcgaacaagcggttaccgacggctgggtctgctgggcgttttccaaccatgacgtggtgcgccatgtcagccgctggactgggccggacggcgatgccgatgcggtagccagattctcgatcatgctgctcgcctgcctgcgcggctcgatatgcctctatcagggcgaggagctcggcctggaggaggcggagcttgcctatgaggatctgcgcgatcccgtcggcatccgcttctggcccggcatgaagggcagggatggctgccgcacgccgatggtctgggaagccggcgccgacaatgcgggtttctcgacggccaggccctggctgccggtcccggccagccatcgcgcccgcgccaccgacgtgcagaacggcagcgagcaatcggtgctgtccgcctaccgctcgacgcttgccttgcgcaggcggcatccggcgctggtcagcggctcgatccgctttctcgacgccgaaggcgatgtgctggccttcatccgcgaaggcgacgggcagaggctgctctgcgtcttcaatttcgccggggagccggggaattggcccttgccaccggatattggcgtcgctgctgtcctggctggcgccgctgttgtcgaggaagaagcgctctcgctgccggctctcggttgcttccttggccggctcgactga

SEQ ID NO: 6 - protein, 544 aa, Mesorhizobium loti MAFF303099
MMADDNAGQGADWWRGCVIYQVYPRSFQDTTGDGSGDLRGITTRLGHIASLGVDAVWLSPFFKSPMADMGYDVSDYRDVDPMFGSLEDFDALVTEAHRLGLKVVIDQVLSHSSDKHEWFVQSRASRDNPKADWYVWADTKPDGNAPNNWLSVFGGPAWEWDSTRRQYYMHNFLASQPDLNFHNPEVQDALLDTVRFWLERGVDGFRLDTVNYYVHDRWLRSNPPLASSVAGTNGETNTYLYQEHLFDKTQPENLAFLRRFRGLLDEYPDRAAVGEIGDEGRSLQTLAAYTSGGDKLQMCYTFDLLGPQFSAAHVRGCVEAFEQAVTDGWVCWAFSNHDVVRHVSRWTGPDGDADAVARFSIMLLACLRGSICLYQGEELGLEEAELAYEDLRDPVGIRFWPGMKGRDGCRTPMVWEAGADNAGFSTARPWLPVPASHRARATDVQNGSEQSVLSAYRSTLALRRRHPALVSGSIRFLDAEGDVLAFIREGDGQRLLCVFNFAGEPGNWPLPPDIGVAAVLAGAAVVEEEALSLPALGCFLGRLD

SEQ ID NO: 7 - DNA, 1851 bp, Thermoplasma volcanium GSS1
  CDS (1)..(1851): transl_table=11
atggtagaggtaaaaataattaaatcagatgggttctttaatgaagtgcttatttcttcggacaaaaaaattcactttgacactgcttatgcggaaggtgattttaattgttttggggaagggagtattgtctccgaaacaacagatgatttaaagtttaaaattgcaaatcttatacctggaaagtaccatttcaagatagctatcgatcagtataaaatccttagagaagctgagaatagatccggctcatactcgttttcaatatggttggaaaaaccttatcacaatccagattatgcacagttttgcgcgattattgacaaaaaacttatggacgttcgaatagcagtaccaaaacacagcatttccgtatctatttttacgaaagatactttaaaacctgtatattcccgaagagcatcttttgatacttttgatgcagttgagtatgtttttgatggtatgtcagattattattttgaagtagataattccaggttacctaaggaaggatatttctcaccaaaagtgcacatcgaacacgaaggcggatcaaagatcatttatcacatatttccagataggttttttagagtaggcccgcatctgccaacactatcaagatggggagataaacctactttttcaagcttctttggaggaaatttgagggggataaccgaaaaaataggttatattaaggccctcaatgttgatacgatataccttaatccagtatataaaagcaagtcgaatcataggtacgatgttgacgattacttctctatagacggattgcttggcggtgaacaggattttatcgagttagtcaacgaagctcatgaaaacggtattaaaatagttgcagacatggtgttcaaccatacctcaacggatttcccctattttttggatgcccttaagaacggaaagaactctaaatactggaattggtacatatttcatggtgaaggcgcagcagtatttgatggtagagcaaaaggaaaaacaaaaccattatacgaaacttttatgggagttgggcgcatgcctaagttaaatcacaagaatgcagaggtaaggaagttctgcatagacgttatgaaatactacaagaacaaatttggagtagatggctttagatacgatgttgcacactcaatctaccctgaattctttttagaagctgtcaaagaatttggaaatgagatgctgcacataggggaagcatggtgtcttccatcaatgttcatgctatctggatactggaatagctttacaaattattatctaagaaatgcgattataaagtttgtccgtgaagaaataaatataaccgagttttataatatgattcaaaatatgataatatcttatggtccgcttattcagcagaatgttatgaatatacttgattcacatgatactgaaaggatattaagggcattcaagggaaataaaaaaaaggtcaagcttgcctattcaatattatttatgttcgatggatttgctacgatttactatggggatgaagttggtcttgacgggggccgagatcctgatgacagaagatgttttccttgggacaatatggatgaagatatgcttcaattcctaaaaaaacttggagaaatcagaagaatgtatcacacaggtagtgccggaataataactgtagaagagactcaggaatgcaaatatataactaggttaagcggtgaatcgataataaaggttgcaattgccaagaagccagttactttagaaggtgaaataatcttgagcagttgtggagaaaagacaatttatgagggagattttgctttgtctatagcgaaatatgcatga

SEQ ID NO: 8 - protein, 616 aa, Thermoplasma volcanium GSS1
MVEVKIIKSDGFFNEVLISSDKKIHFDTAYAEGDFNCFGEGSIVSETTDDLKFKIANLIPGKYHFKIAIDQYKILREAENRSGSYSFSIWLEKPYHNPDYAQFCAIIDKKLMDVRIAVPKHSISVSIFTKDTLKPVYSRRASFDTFDAVEYVFDGMSDYYFEVDNSRLPKEGYFSPKVHIEHEGGSKIIYHIFPDRFFRVGPHLPTLSRWGDKPTFSSFFGGNLRGITEKIGYIKALNVDTIYLNPVYKSKSNHRYDVDDYFSIDGLLGGEQDFIELVNEAHENGIKIVADMVFNHTSTDFPYFLDALKNGKNSKYWNWYIFHGEGAAVFDGRAKGKTKPLYETFMGVGRMPKLNHKNAEVRKFCIDVMKYYKNKFGVDGFRYDVAHSIYPEFFLEAVKEFGNEMLHIGEAWCLPSMFMLSGYWNSFTNYYLRNAIIKFVREEINITEFYNMIQNMIISYGPLIQQNVMNILDSHDTERILRAFKGNKKKVKLAYSILFMFDGFATIYYGDEVGLDGGRDPDDRRCFPWDNMDEDMLQFLKKLGEIRRMYHTGSAGIITVEETQECKYITRLSGESIIKVAIAKKPVTLEGEIILSSCGEKTIYEGDFALSIAKYA

SEQ ID NO: 9 - DNA, 1422 bp, Thermotoga maritima MSB8
  CDS (1)..(1422): transl_table=11
atgatgtacccgatgccgtcttgggtttacgacagtgtcgtgtatcagatctttccagatagatttttcatcggaaagggaaaaacggtggaagacaaaaaggatctgtacctgaagcggggaggagtcatagagaaatggggagttcctccccgcaaacttcccggtgctcagcacgtgaagatcttctacggaggagatctgtggggaatagccgagaaggtcgattattttgaagaacttggaatcaacgttctgtacctcactcctatctttttgtccgataccaatcacaagtacgacacgatcgattacttcagggtggatccacagttcggcggaaagagggcttttctgcaccttttgagggttctccatgagaggagtatgaaactcattctcgatggtgtgttcaaccacgttgggagtcagcatccgtggttcaaaaaagcgaagaaaaacgatccagagtacgtgaacagatttttcctttacaaagataggcacagatcgtggttcgacgttggaagccttcccgagctgaacgtggaagtcgaagaagtgaaggaatacattttgaaagttgtcgagcactacctgaaactggggatagacggttggaggctggattgtggccacgatcttggacctaccgtcaacctgtggatcaacatgaaagtgaaagagttctcagcggaaaagtacctcgtgagtgagatatggacttacccggcaggatgggatatggttgatggtctgatgaattacaacttcagaaaccttgtgcttagttatgtgaacggcgagacggattccataggttttcacctggaaagagcttacagggagacgaagaacatattcggttgctggaacatgcttgacagtcacgacaccccgagactcgccacaatggttcccgacagagacctgagaaaactcgctgtagttcttcagttcacttatcccggtgttccgctcgtttactatggaacagagataggtctcacaggtggagaagatccagagtgtcgtgccaccatggaatggaacagagagaaatgggatgttgatctgttcgagttctacaagaagatgatcagactgagaaggacggatccaggtttgcgctttggagagtttgtcttgctgaacgactcacctctcgcgtttctcagaaaggctcctcatcctcttcaaaacaccatcgtggtggtgaacccaggagaagagaaggtgctggttctctccattcccgacgggaaaattatgaacaccactccccttgtcgatgtgttcagcggagaaagattccacgttgacggcggggttgtgaagcttccccttctagcgagatctttcagaattctcaagcccgaggatctgagagtgggtaagtacagattgtacaagagagtttga

SEQ ID NO: 10 - protein, 473 aa, Thermotoga maritima MSB8
MMYPMPSWVYDSVVYQIFPDRFFIGKGKTVEDKKDLYLKRGGVIEKWGVPPRKLPGAQHVKIFYGGDLWGIAEKVDYFEELGINVLYLTPIFLSDTNHKYDTIDYFRVDPQFGGKRAFLHLLRVLHERSMKLILDGVFNHVGSQHPWFKKAKKNDPEYVNRFFLYKDRHRSWFDVGSLPELNVEVEEVKEYILKVVEHYLKLGIDGWRLDCGHDLGPTVNLWINMKVKEFSAEKYLVSEIWTYPAGWDMVDGLMNYNFRNLVLSYVNGETDSIGFHLERAYRETKNIFGCWNMLDSHDTPRLATMVPDRDLRKLAVVLQFTYPGVPLVYYGTEIGLTGGEDPECRATMEWNREKWDVDLFEFYKKMIRLRRTDPGLRFGEFVLLNDSPLAFLRKAPHPLQNTIVVVNPGEEKVLVLSIPDGKIMNTTPLVDVFSGERFHVDGGVVKLPLLARSFRILKPEDLRVGKYRLYKRV

SEQ ID NO: 11 - DNA, 1671 bp, Thermotoga maritima MSB8
  CDS (1)..(1671): transl_table=11
gtgaaggttgtgaagaagccttttttactgcttgcttttgtgtttttactcttcctcacctcctgctttcaaacgtctatgagtcaatccctcgtttcaagtaatccacattcaaacagcacaaacacagatggtactagctccaaccttgaagaagtaaaataccccgtcgtctacgaaattttcattcgctctttttacgacagagacgggaacggagtgggagatttaaacggtgtttctcagaaagttgattatctgaaggaactcggcgttgacgctgtgtggtttatgcccttcaacgaggctgtttcataccatggatacgacataacagactactacaacgtcgagaaagactacggcaccatggaagatctcgaaaacatgatccaggtgctccatgagaacggaataaaggtaataatggatctcgtgatcaaccacacatccgatgagcatccctggttcaaagacgccgtggaaaacacgaccagctctccgtactgggactactacataatgagtcttgaagatcattctggtcaggatcactggcactggaagatcaactcaaagggtcaaaaagtctggtatttcggactttttggctataacatgccggatctgaaccacgacagtcagaaagtgagagaagaagtaaagaaaatcgtggatttctggatttccaaaggtgttgatggattcagaatagatgctgcaaagcacatatatggctggtcctgggacgatgggatacaggagtcggccgaatattttgaatggttcagagattatgtgctttccaaaaagcccgatgccatacttgtgggagaggtgttcagcggaaacacgtacgatctttctctatatccaattcccgttttcaatttcgccctcatgtacagtataaggaactacccagaagggcaggatggaatgatagaaaacaactgggttgaggagtctttcctgtttcttgagaatcacgatctccacaggttcttctcccatcttcaagaacattacaaaaagttctccgagtccgactacgagttcatcaaaaaacgtgctgctctctggtattttctgatattcacactgaaaggatctcctgttatctactacggcggtgaaattggaacgagaggtttcaagtggcacggtcctgtatatgacgagccggtgagagagccgatgcagtggtacgcaagcggtacaggagaaggtcaaaccttctggacaaaggaagtctacaaaaacgcggggataacctttggaaacgctgatgttgacggatgtatctatgacgatccttacgatggcttttctgtcgaagaacaggaaagcgatccgaagagtcttttgaatttcatcagattcattctcaacttcagaaaagatcacgacgccattttgaatggagatcaaacgatcttcagggactggaaaaacctcatagcgttctacagagaatcctccaacgaaaagctgttggtggtcttgaatccggatccagtctggcaaaacagcttcacttttgaagaaaacatgacgatgattctcgaggtagattttgaaaacttcatctggaacgagtcaaacgtgtctttttcagcgggtgaatccttcactgtggatcccatgaaagcgtacattttcaaaaagtga

SEQ ID NO: 12 - protein, 556 aa, Thermotoga maritima MSB8
MKVVKKPFLLLAFVFLLFLTSCFQTSMSQSLVSSNPHSNSTNTDGTSSNLEEVKYPVVYEIFIRSFYDRDGNGVGDLNGVSQKVDYLKELGVDAVWFMPFNEAVSYHGYDITDYYNVEKDYGTMEDLENMIQVLHENGIKVIMDLVINHTSDEHPWFKDAVENTTSSPYWDYYIMSLEDHSGQDHWHWKINSKGQKVWYFGLFGYNMPDLNHDSQKVREEVKKIVDFWISKGVDGFRIDAAKHIYGWSWDDGIQESAEYFEWFRDYVLSKKPDAILVGEVFSGNTYDLSLYPIPVFNFALMYSIRNYPEGQDGMIENNWVEESFLFLENHDLHRFFSHLQEHYKKFSESDYEFIKKRAALWYFLIFTLKGSPVIYYGGEIGTRGFKWHGPVYDEPVREPMQWYASGTGEGQTFWTKEVYKNAGITFGNADVDGCIYDDPYDGFSVEEQESDPKSLLNFIRFILNFRKDHDAILNGDQTIFRDWKNLIAFYRESSNEKLLVVLNPDPVWQNSFTFEENMTMILEVDFENFIWNESNVSFSAGESFTVDPMKAYIFKK

SEQ ID NO: 13 - DNA, 1737 bp, Bacillus halodurans C-125
  CDS (1)..(1737): transl_table=11
ttgaaagctacaatctaccatcgaccaaaaagtgaagacgcttatgcttatgataaaagcacgatgcacattcgtcttcgcacaggtaagaatcacgtgcgaaaagtgaacctgatttatggtgatccttatgactggacgaaaaaccaatgggtaacttctaaaaaagagatgactccaacaggatctgatgcacagcatgatttctggttcgtagaggtgactcctccttatcgacggttgcgttatggtttcgaaattataacaaaaactgaaacgatctactatggagaaagtgggtttctcgatacaccatcaaaagatacgagcgactatttctgctttccatttatgaatccagctgatttgttttcaccacctgagtgggtaaaagacaccgtatggtatcaaatttttcccgaacgctttgcaaatggggatccgagccgtaatcctgaaggtaccttaccgtggggaagcgctgccccaactccaaccaaccatttcggtggagaccttcaagggatcatcgaccatctcgattacttgcaagagttagggattaatggaatctatttaacaccgatctttgaagcgtcttctaatcataaatacgacacgattgattatttaaaagtggaccctcactttggtgataaaacaacatttaaacgtcttgtagatgagtgccacaaacggggaattcgcatcatgcttgatgccgttttcaatcatgcaggcttctactttccaccgtttcaagatgtgctcaaaaaccagcaacactcaaaatatagtgattggtttcatttgcgtgactttcctgttcgtgctgaagagccgcccaactacgatacgtttgccttcacgccatttatgccaaagttcaatacggaaaacgaggaagtgagggaatacttactgaatgtggcaacgtattggatcaaagagtttgacattgacggctggcggttagacgtagctaatgaagtcgatcatgccttctggcgagaatttcgtaaaagagttaaagcattaaagcctgacttatacatccttggtgaagtatggcacaactcccttccttggcttgccggcgatcaatttgatgcggtcatgaattatccactgactaatgcgatcatcgattttgccggaaaacaaaagataggtcaacagcgattcgagcatgtcataacccaattgacgcacatgtacccaattcacgtccaacaagtagcctttaatttgctcggtagtcatgataccccgcgaatattgacgcaaacggacaatgatgtggcacgtgttaaacttcagtttctcttgctcttttcgcagcgcggaacaccgtgtatttattacggtgatgagattggcatgacgggtgggcaagatcctggatgtcgtaaatgcatggtttgggaagaagaagaacaaaatcaagagttactctcctttgtcaaaaggctcattcaacttcgcaagcaagagaaagctttcggaaccgaaggggatttgacgtttgtggagaatgattcttctcttctcatctatcaaaagacatacgaaaatcaacagctcttgtttgtcatcaattcaacagatcaaccagacagtgttcagttacctgttagctggacaaatcgtaacgcaaatgacttgctaacaggtgaaactttctcgctcgcaacagaaattgtcatcccggctaaatccgcgatggttcttaaatag

SEQ ID NO: 14 - protein, 578 aa, Bacillus halodurans C-125
MKATIYHRPKSEDAYAYDKSTMHIRLRTGKNHVRKVNLIYGDPYDWTKNQWVTSKKEMTPTGSDAQHDFWFVEVTPPYRRLRYGFEIITKTETIYYGESGFLDTPSKDTSDYFCFPFMNPADLFSPPEWVKDTVWYQIFPERFANGDPSRNPEGTLPWGSAAPTPTNHFGGDLQGIIDHLDYLQELGINGIYLTPIFEASSNHKYDTIDYLKVDPHFGDKTTFKRLVDECHKRGIRIMLDAVFNHAGFYFPPFQDVLKNQQHSKYSDWFHLRDFPVRAEEPPNYDTFAFTPFMPKFNTENEEVREYLLNVATYWIKEFDIDGWRLDVANEVDHAFWREFRKRVKALKPDLYILGEVWHNSLPWLAGDQFDAVMNYPLTNAIIDFAGKQKIGQQRFEHVITQLTHMYPIHVQQVAFNLLGSHDTPRILTQTDNDVARVKLQFLLLFSQRGTPCIYYGDEIGMTGGQDPGCRKCMVWEEEEQNQELLSFVKRLIQLRKQEKAFGTEGDLTFVENDSSLLIYQKTYENQQLLFVINSTDQPDSVQLPVSWTNRNANDLLTGETFSLATEIVIPAKSAMVLK

SEQ ID NO: 15 - DNA, 1704 bp, Streptococcus pyogenes M1 GAS
  CDS (1)..(1704): transl_table=11
atgaatgttgccggaatgctccatattcctgattcgaggtattgctttgccatatctcaaaaggaacttgtcatccgattacgcgtggccaaagaagatagaggtattactgttaatttggtccacgggcctaaatatggttatcatgaattccaagaagaattggaaatgtcagttgcctatacagaccatacgcatgcttattatgaaactactttaacattagacgatgtgaggttggcctacatttttaaaattgaagaagaaggtcaaacctattattttagtgaagatgggttaactactagttacgatttttcaaatgggttttataatttcttccaaatgccttatatcaatgctgttgatgttcatcaagtcattccttggacaaaagacgcggttttttatcaaatctttgttgatcgctttaaccgtggggattgggaaaaaggtgacagttatgtcaacatgggttggttagaaaaaccgactcctaaaagttttgctggtggagatttaaagggaattacagaaaaattagattacctcaaagatttagggattactgtcatctatttaacgccaatttttcaatccattagtaatcacaaatatgatattagtgattactacgctattgatccacaatttggaactaaatatgatttgcaagaattgattgatttagctcacaaaatgggaatcaagattattctagacgctgtctttaaccatgccagcagtgatgccgtggaatttcaggatgtcttgagatacggtaaagagtctaagttttttgattggtttatgactcatgatgaacacccatccatggacctagtaaactatgaaacctttgctggatgtaactatatgcccaaatggaatacctcaaatagagacgtgcaagactatctgattgagattgggcgatactggattaaagaattttgtatcgatggttggcgcctagatgtttctgatgaagtatctcatgatttttggcgacgtttccgtcaggcggttaaagcggaaaaagcagatgccattttaattggggagaactggcatgatgcctatccttatttggcaggggatcagtatgatgggataatgaattatgctttcaccaaagcctgtttggattactttgcttttgaaaccatgacatcaaaacaattggctgagaaattaagcaacattttgatgcgaaacacttggcaagtcaatcgcatgaacttgaatcttttggattctcatgatacgcatcgtttcttcactcaagttaagggttccaaagataaattgttagctgctttagcattgctctttatctttatgggcattccttgcttgtattatgggacagaagtggcaatggaagggggttacgaccctgattcgcgtcgcggttttccttgggatgatgctgagcgggacaaggatttctttagcaaagtaaaagcgattattgctcttcgccaacagccagctcttcaagaaggagctattagcattgattatgacgaagactgcctcattctgaaacgcagcttaggtgagcaaagcatttcacttgttcttaacaatggtgagagtgcttattctattaaggaaggaggacagattttgacaagcaatggggtaactaaaaacaaaaaacaattactccaggatggatatattgtgtttagtaactaa

SEQ ID NO: 16 - protein, 567 aa, Streptococcus pyogenes M1 GAS
MNVAGMLHIPDSRYCFAISQKELVIRLRVAKEDRGITVNLVHGPKYGYHEFQEELEMSVAYTDHTHAYYETTLTLDDVRLAYIFKIEEEGQTYYFSEDGLTTSYDFSNGFYNFFQMPYINAVDVHQVIPWTKDAVFYQIFVDRFNRGDWEKGDSYVNMGWLEKPTPKSFAGGDLKGITEKLDYLKDLGITVIYLTPIFQSISNHKYDISDYYAIDPQFGTKYDLQELIDLAHKMGIKIILDAVFNHASSDAVEFQDVLRYGKESKFFDWFMTHDEHPSMDLVNYETFAGCNYMPKWNTSNRDVQDYLIEIGRYWIKEFCIDGWRLDVSDEVSHDFWRRFRQAVKAEKADAILIGENWHDAYPYLAGDQYDGIMNYAFTKACLDYFAFETMTSKQLAEKLSNILMRNTWQVNRMNLNLLDSHDTHRFFTQVKGSKDKLLAALALLFIFMGIPCLYYGTEVAMEGGYDPDSRRGFPWDDAERDKDFFSKVKAIIALRQQPALQEGAISIDYDEDCLILKRSLGEQSISLVLNNGESAYSIKEGGQILTSNGVTKNKKQLLQDGYIVFSN

SEQ ID NO: 17 - DNA, 1614 bp, Streptococcus pyogenes M1 GAS
  CDS (1)..(1614): transl_table=11
atgaacaaccactggtggcataaagctacgatttatcagatttacccaaggtcctttaaagacaccagcggcaatggtattggtgatttaaaaggcattaccagtcaactggactacttgcaaaaacttggcattacagccatttggttatctcctgtttaccaaagtccaatggatgacaatggttatgacatctctgactatgaagcgattgctgatgtttttggagacatggcagatatggatgagctcttagcagcagctaatgagcgaggcattaagattatcatggacttggtggtcaaccatacgtctgatgagcatgcttggtttgttgaagctagagaaaatcccaatagtcctgagcgtgattactatatttggcgtgacgagccaaacaacctcatgtctattttttcaggatctgcttgggaattggatgaggcatcaggacaatattacctgcatttgtttagcaagaaacagcctgatttgaactgggaaaatgctcagctgcgccaaaaaatttacgatatgatgaatttctggattgccaaaggcatcggtggttttcgtatggatgtgattgacctgattgggaaggttcctgacttggagatcacgggtaacgggccgcgcttacacgattacctcaaagaaatgaatcaagcaacctttggcaaccatgacgtgatgacagtcggtgagacttggggagcaacgcctgaaattgctcgccagtattctcgccctgaaaacaaagagttatccatggtcttccaatttgagcatgtgggtcttcaacataaacctgacgctcccaagtgggattatgccaaagaattagacgtgcctgctctgaaagctatttttagcaagtggcagacagaattaaagttaggagaaggctggaattcgcttttttggaataaccatgacttgccacgggtcttatccatttggggcaatgacagcacttaccgagaaaaatcagccaaggctttagctattttactgcatttgatgcgaggaaccccttacatttaccaaggagaagagattggcatgaccaattatccttttaaagacttaaccgaggttaatgatattgagtcccttaactatgctaaggaagctatgggaaatggagtgtcagctgcgcgtgtgatggatagcatccgtaaggtaggacgagacaatgctagaacgccgatgcagtggtctaaggacacacatgctggcttttctgaagcaaaagagacttggttgccggtcaaccccaactaccaagacatcaatgtggccgatgcccttgctgatccagactctattttttacacctaccaaaaattgattgccttgcgtaaggagcaagactggctagttgaagcggattatcacctcttgccaacagctgataaagtgtttgcttatcagcgtcagcttggagaagagacgtatgtgattgttgtcaatgtgtctgatgaggagcaagtctttgccacagacttagcaggtgcacaagtgatcatcgccaatacagatgtggacacggtattagagaccaagcacttacaaccttgggatgccttttgtctcaaactgaaggcctag

SEQ ID NO: 18 - protein, 537 aa, Streptococcus pyogenes M1 GAS
MNNHWWHKATIYQIYPRSFKDTSGNGIGDLKGITSQLDYLQKLGITAIWLSPVYQSPMDDNGYDISDYEAIADVFGDMADMDELLAAANERGIKIIMDLVVNHTSDEHAWFVEARENPNSPERDYYIWRDEPNNLMSIFSGSAWELDEASGQYYLHLFSKKQPDLNWENAQLRQKIYDMMNFWIAKGIGGFRMDVIDLIGKVPDLEITGNGPRLHDYLKEMNQATFGNHDVMTVGETWGATPEIARQYSRPENKELSMVFQFEHVGLQHKPDAPKWDYAKELDVPALKAIFSKWQTELKLGEGWNSLFWNNHDLPRVLSIWGNDSTYREKSAKALAILLHLMRGTPYIYQGEEIGMTNYPFKDLTEVNDIESLNYAKEAMGNGVSAARVMDSIRKVGRDNARTPMQWSKDTHAGFSEAKETWLPVNPNYQDINVADALADPDSIFYTYQKLIALRKEQDWLVEADYHLLPTADKVFAYQRQLGEETYVIVVNVSDEEQVFATDLAGAQVIIANTDVDTVLETKHLQPWDAFCLKLKA

SEQ ID NO: 19 - DNA, 1974 bp, Deinococcus radiodurans R1
  CDS (1)..(1974): transl_table=11
ttgaccgcgctgcccttttcccccacactggcttgcaaatccaaaggcaacgcttgccccctccggcacgacctcccagcgcgactttgcgcggcaggccgtgccggagcttcgttttgccccctcatccaaggagttcttatgtaccccaccgccaccctgagtgcccagcacgaccacacccccggttacaccgaacgcctcggtgcgctcctcggcgggcacgtccgcgtgcggctgcggaccaccctgccggtcctgggcgtgcggctcaaagtcgtgcagatcggtgaaatcgagactcttcccgcccgcgaggtgacgggcttgcagggcgaaggccgctggttcgaggccgacctgccgctgcacgaggcccgcgtgcgctacgcctggcacctcgacctgcctggcgaccacctcaacctgacccggctggggctgcaccacgcgcgccggggctttcgctcgtggtttcagtacctcgcgggctatcaggcgcccgagtgggcctggaagtcggtcttttatcagattttccccgaccgctttcgcaacggtgattccacgaacgacgtgcagaccggcgaatacttgtacgaaggccgcccggtggaaaaggtggagtggacgcacccggttgacgcctggggcgatattcacgggcactacggcggcgacctcgcgggcatcacgcaggcggtgccgtatttgcaggcgctcggcgtgaccgggctgtggctcacgccgattttcacctcgccgagcaaccaccgctacgacatcaccgattaccgcgccattgacccccacctcggcggggacgccgcgtgggacgcgctggtgcaggcgacggacgcggcgggcatccgcatcgtccttgacggggtgttcaaccatatgggcaacgaaaacgcgctgtttcaggccgcgctcgctgccgaggacgcccccgagcgggccatgttcacctggcgcgatacgccgggcaagccgccctaccactcctttttcgacgtggcgacgctgcccaaaatcgactacgccaacgagcgggcggtggaggagtttttcagcggcgagcgcagtgtggtccggcactggctgcggcgcggcgcggcgggctggcggctggacgtggcgcacatgctcggcaagggcggcaccgaggaagacaatctggcgctgcaccgcgtgctcaaggcggcggcgcggcaggaaaaggccgacgcctacgtgttcggcgagcgcttctacgaccccgaactcgcgctcgacgggcagggcgaagacggcgcgatgaactaccacggttttggcctcccggtgatgcagtggctggcgggcgcgacctatttcaacgaaccgagccgcctggacggcactgaactcgccgaaattctctgggatgcgtaccacgcgctgccaccgcaggccgcgctgaacatgttcaacctgctcgaatcgcacgacatcgggcgggcgctgtggcggctggggggcgaccgcaccaagtaccgcgccgcactcacgctgctgctcgcctacgcgggcgtgccgtgcctgtactacgggagcgaaatcggcctctcgcagtcgcgcgacggcaacatgccgtggtgccgcgagccgatgccctgggacgaggcgaggtgggacatggagctgctcgcccatgtcaaagctctggtgaaggttcgccgcgagacgcccgtgttgcacaccggggcccttcagttcatccacgccgagccggacgccctcgccttcctgcgcgaagtgaccgggccggacggcgcggcggagcgggtggtcgccctcgccagccgccgggccggggcacatccggtgaccttcaccctcccggcgggcgagtggcaagacgccctgagcggcgagcggctcggcgggggagaggtcacgctggacgcggcgggcgggcagttgctgctcagtttgcctctcagtcgctga

SEQ ID NO: 20 - protein, 657 aa, Deinococcus radiodurans R1
MTALPFSPTLACKSKGNACPLRHDLPARLCAAGRAGASFCPLIQGVLMYPTATLSAQHDHTPGYTERLGALLGGHVRVRLRTTLPVLGVRLKVVQIGEIETLPAREVTGLQGEGRWFEADLPLHEARVRYAWHLDLPGDHLNLTRLGLHHARRGFRSWFQYLAGYQAPEWAWKSVFYQIFPDRFRNGDSTNDVQTGEYLYEGRPVEKVEWTHPVDAWGDIHGHYGGDLAGITQAVPYLQALGVTGLWLTPIFTSPSNHRYDITDYRAIDPHLGGDAAWDALVQATDAAGIRIVLDGVFNHMGNENALFQAALAAEDAPERAMFTWRDTPGKPPYHSFFDVATLPKIDYANERAVEEFFSGERSVVRHWLRRGAAGWRLDVAHMLGKGGTEEDNLALHRVLKAAARQEKADAYVFGERFYDPELALDGQGEDGAMNYHGFGLPVMQWLAGATYFNEPSRLDGTELAEILWDAYHALPPQAALNMFNLLESHDIGRALWRLGGDRTKYRAALTLLLAYAGVPCLYYGSEIGLSQSRDGNMPWCREPMPWDEARWDMELLAHVKALVKVRRETPVLHTGALQFIHAEPDALAFLREVTGPDGAAERVVALASRRAGAHPVTFTLPAGEWQDALSGERLGGGEVTLDAAGGQLLLSLPLSR

SEQ ID NO: 21 - DNA, 1497 bp, Deinococcus radiodurans R1
  CDS (1)..(1497): transl_table=11
gtgagccgcccacccgctatcctgcgccccgccatgtccgagcccgtctctgccgttcccctgtctgctcccgtcacccccgagtgggtcgccgacgccgtcttctaccagattttccccgaccgcttcgcccgctcgggccgcgtgaccggcctgcaccttcagccctggggcagcgcgccgaccattcacggctacatgggcggcgacctgtggggcgtggccgagcggctgggcgaccttgccggcctcggcgtgaatgcgctgtatttctgcccggtgtttcagtcggcctccaaccaccgctaccacacccacgactattttcaggtggaccccatgctcggcggcaacgcggcgctgcggcacctgctcgatgaggcgcacgcgcgcggcatccgggtggtgctcgacggggtgttcaaccatgccagccggggcttttttcagttcaacgacctgctcgaacacggtgaggcgagtgcgtaccgcgactggtttcatgtgaccggctggccgctgagcgcctacgacgaggaccgccccgccaactacgcggcgtggtggggcatccgggcgctgcccaagttcaacaccgaccaccccgaggtgcgcgagtttctgctgagcgtggccgaatactggatgcacttcggcatcgacggctggcggctcgacgtgccgaacgagattgacgacgacgccttctggcaggagtttcgccgccgggtcaaggcgattaaccccgacgcctacatcgtgggcgaaatctggggcgacgccggacgctggctggcgggcgaccagttcgacgcggtgatgaactaccacttcacccgcccctgcctgggctttttcggggcgcggacgctcgaccatccgatgaacgaacgcagcggcaccgggcgggtggagccgctggacgccgccgcttttgccgtgcgggtggaagaagtcacccgcatgtaccaccccgccgtcgtgcgcgcgcagctcaatctgctcgactcgcacgacaccgcccgcttcctgacggcggtgggcggcgacgcctcggcgcagcggctcgcgctcgtgtttcagttcagctatgtgggcgcgccctgtctgtactacggcgacgaaatcgggctgcccggcggcgtggaccctgactgccgccgcgcttttccctgggacgagccgcagacctgggaccacgacaccctgaccctcgtgcgcgagttgacggcggcgcggcaccgttcggcggcactgcggcgcggcgactttacggtgctgcacgcgcagggcgagcaggtgtcgttcgctcgcaagcatgacggagaggcggcgtatgtggccttcaactgcgcgctggatgccgccccggttccggtgcccgccacatcgggccgttaccgcgacatgctgacgggcgcggtgcatgacctgaacgaaagctcggtgctgacgctgcctgcccggacggcggcgttgctgctgtgcgaggggtaa

SEQ ID NO: 22 - protein, 498 aa, Deinococcus radiodurans R1
MSRPPAILRPAMSEPVSAVPLSAPVTPEWVADAVFYQIFPDRFARSGRVTGLHLQPWGSAPTIHGYMGGDLWGVAERLGDLAGLGVNALYFCPVFQSASNHRYHTHDYFQVDPMLGGNAALRHLLDEAHARGIRVVLDGVFNHASRGFFQFNDLLEHGEASAYRDWFHVTGWPLSAYDEDRPANYAAWWGIRALPKFNTDHPEVREFLLSVAEYWMHFGIDGWRLDVPNEIDDDAFWQEFRRRVKAINPDAYIVGEIWGDAGRWLAGDQFDAVMNYHFTRPCLGFFGARTLDHPMNERSGTGRVEPLDAAAFAVRVEEVTRMYHPAVVRAQLNLLDSHDTARFLTAVGGDASAQRLALVFQFSYVGAPCLYYGDEIGLPGGVDPDCRRAFPWDEPQTWDHDTLTLVRELTAARHRSAALRRGDFTVLHAQGEQVSFARKHDGEAAYVAFNCALDAAPVPVPATSGRYRDMLTGAVHDLNESSVLTLPARTAALLLCEG

SEQ ID NO: 23 - DNA, 1695 bp, Deinococcus radiodurans R1
  CDS (1)..(1695): transl_table=11
ttgaatcccgtgtcttctatttcatataaaaaatattttccggcgtcgcaattctcatctgaaacgattcagtccaccctaaacttgagcatgacttccctgcaaggcgagctgaaatggtggcaaagcggcatcatttaccagatttacccacgttcctatcaggacagcaacggcgacggcgtgggcgacctgcccggtatcacggcgcggctgccgtatgtcgcgagtctgggggtgcaggcggtgtggctctcccccattttcaaaagcccgatgcgcgatttcggatacgacgtggcggattactgcgacattgacccggtgttcggcacgctggagcagttcgatgcgttggtggccgaggcgcaccggctggggctgaaggtcatgctcgactacgtgcccaaccacaccagcagcgaccacgcctggttccaagaggcgctcacgggcaaggccagcgccaaacgcgactggtacgtatggcgcgaccctgccccggacggcgggctgccgaacaactggaaatccttcttcggcggcccggcatggacgctggacgaggcgagcgggcagtattacctgcaccagtttttgccctcacagccggacctcaactggcgcaatcccgacgtgcgggcggcgatgtttgatgtgctgcggttctggatgcgccggggcgtggacggcttccgggtggacgtcatctggctgctggccgaggacgagcggtttctggacgagccggaaaaccccgacgccgaccgcgaagtcgttggcgggcagatcgaacacagtacgctgctgcacatctacacgcaggaccagcccgagacgcacgactatgtgcgcgagatgcgccgggtgatcgacgagttcgacgaccggatgatggtcggtgaaatctacctgccgctcgacaaactgctgccctactccggcacgcccgaggcgccgatggtgcatctgccgttcaactttcacctgattctgctgccgtgggacgcgcaaaccatccggcagttcgccgacgagtacgacgcagcgagcaacgcggcgggggcgtggcccaattgggtgcttggcaaccacgaccagcaccgcttcaagacgcgggtgggcgcggcgcagtaccgggtcgcgcaaacgctgctgctcacgctgcgcggcacgccgacggtgtactacggcgacgagatcggtatggaaaatgtgcccgttcccccggagaagatggtggacccctccggcctgcaacagcccgacagcccggacgccgggcgcgaccccgagcgcaccccgatgcagtgggaggcggcgccgggcgcaggatttacggcggcaggcaccgagccctggctgccgctcaccgacaacttcgcgcaggtgaacgtgcaagttcaggagcaggactcgcagagcgacctgaactacttccgcgccctgacccgcctgcgccaggagcagccggccctggtgggcggcagctaccgcagcctggacagcgggcacgccgacgtatttgccttcgagcgtgaactgaacggcgagcggttgacggtgtggctgaatttccgcggtgaggaacgcgcggtggccgccacggggcaaacgcttctgagcagccgtggcgatcagcccgccgcccaatcgccgctgcgcgggcacgaggcgcgggtggtgctgggttga

SEQ ID NO: 24 - protein, 564 aa, Deinococcus radiodurans R1
MNPVSSISYKKYFPASQFSSETIQSTLNLSMTSLQGELKWWQSGIIYQIYPRSYQDSNGDGVGDLPGITARLPYVASLGVQAVWLSPIFKSPMRDFGYDVADYCDIDPVFGTLEQFDALVAEAHRLGLKVMLDYVPNHTSSDHAWFQEALTGKASAKRDWYVWRDPAPDGGLPNNWKSFFGGPAWTLDEASGQYYLHQFLPSQPDLNWRNPDVRAAMFDVLRFWMRRGVDGFRVDVIWLLAEDERFLDEPENPDADREVVGGQIEHSTLLHIYTQDQPETHDYVREMRRVIDEFDDRMMVGEIYLPLDKLLPYSGTPEAPMVHLPFNFHLILLPWDAQTIRQFADEYDAASNAAGAWPNWVLGNHDQHRFKTRVGAAQYRVAQTLLLTLRGTPTVYYGDEIGMENVPVPPEKMVDPSGLQQPDSPDAGRDPERTPMQWEAAPGAGFTAAGTEPWLPLTDNFAQVNVQVQEQDSQSDLNYFRALTRLRQEQPALVGGSYRSLDSGHADVFAFERELNGERLTVWLNFRGEERAVAATGQTLLSSRGDQPAAQSPLRGHEARVVLG

SEQ ID NO: 25 - DNA, 1452 bp, Deinococcus radiodurans R1
  CDS (1)..(1452): transl_table=11
atgcaccacctcatcctcccggcgctgctgctcgcctccgccgccagcgcccaggctgcgcctacatcaaccggccccagctttgaaggccagatcatctatcaggtcatgcccgaccgtttcttcgacggtgacccttccaacaatgccggggtggaccgtgccaacctccgcgcctggcacggcggcgacctcgcggggctgacgcaaaagctgccttacatccagaaacttggggcgacggccatctggatgacgccgatctaccgccagcagaccgccaaatccttcgacaccgccgcttatcacggctactggcccgccgatttccggcaggtggacccgcacttcggctcgatggcgaccttcgatacgttcatgaaggcagcgaaaggcgcggggatgaaggtggtccttgaccaggtcatcaatcactacggctacgaggccccagcggtgaaggccaatccgggctggttcaacggcaaggcgcagtgcgacgcgaccaagaacaaggacgtggactgtcccctcgccggcctacccgacctgcgccagagcgtgcccgccgtgcgccagcagttgttcgggaacggcgacttctggcgggcgcgaggggtggacggcttccgttacgacgcgatcaagcatgtggagcggcctttcctgctcgacctgctgaaaaaagaccgcgccgccggcacctggacgctcggcgagtggtacgacgccgacgcgggcacggtggccgagtggcaaaagcaggggtttgacagcctgtttctcttcagcttgcaagcggcgatgcgcggcagcgtgatgggcgcgtccagcctggtcaacgtgcgcgaggtgctgcgccgctcggacgaacttgcccggcccggcgaggtggcactgtttctcgacaaccacgacgtgccgcgtttctcgcagggcagctttttcgaggacgaagggcaggcccgcaccaaatacggcctgcgggcgctgctcacgctgcggggcgtgccggtcctctaccagggcaccgaaattgccatgcgcggcggagccgaccccgacaaccggcgcgacatgcgctttgaaagccagtggacgcccgccgaaaaagccgtatacaacgtggcccgcgacgccattgccgtccgcaaggcgagcccgcccctcagtcggggcacccagacgctgcttcccgtccccgaccggcaggccgacgacctgctgctgctgacccgcgagcagggcggacagcgggtgctggtggcctggcacaacgggttgaaacgccagagctactcgctgaagctcagtaccctgggaatcaaggcgaacgctcaggatgtgaccaagacgctgtttgccgggcaggacgccaaagtgagcgtgaagggcgggtatttgcacctgagcctaccgcctaaggacgcggcggcgttcgttttgcggtga

SEQ ID NO: 26 - protein, 483 aa, Deinococcus radiodurans R1
MHHLILPALLLASAASAQAAPTSTGPSFEGQIIYQVMPDRFFDGDPSNNAGVDRANLRAWHGGDLAGLTQKLPYIQKLGATAIWMTPIYRQQTAKSFDTAAYHGYWPADFRQVDPHFGSMATFDTFMKAAKGAGMKVVLDQVINHYGYEAPAVKANPGWFNGKAQCDATKNKDVDCPLAGLPDLRQSVPAVRQQLFGNGDFWRARGVDGFRYDAIKHVERPFLLDLLKKDRAAGTWTLGEWYDADAGTVAEWQKQGFDSLFLFSLQAAMRGSVMGASSLVNVREVLRRSDELARPGEVALFLDNHDVPRFSQGSFFEDEGQARTKYGLRALLTLRGVPVLYQGTEIAMRGGADPDNRRDMRFESQWTPAEKAVYNVARDAIAVRKASPPLSRGTQTLLPVPDRQADDLLLLTREQGGQRVLVAWHNGLKRQSYSLKLSTLGIKANAQDVTKTLFAGQDAKVSVKGGYLHLSLPPKDAAAFVLR

SEQ ID NO: 27 - DNA, 1659 bp, Deinococcus radiodurans R1
  CDS (1)..(1659): transl_table=11
atgacccaggcacacccggagtggtacaagagcgctgtcttctacgaactgtccgtgcggacctttcaggacggcaacggcgacggcaagggcgattttcccggcctgacctcgcggctggactacctgaaaaacctcggcgtggactgcctgtggttgctgccctggtttcccagcccactgcgcgacgacgggtacgacgtggccgactaccgggggattcaccctgacctcggcacgctcgacgacttcaaggtctttctgcgcgaagcccacgcccggggcctgcgggtcatcggcgacctggtgaccaaccacacgtccagcgaccacccctggtttcaggcggcgcggcgcggcccgaccctgcccgacggctcgcccaacgagtaccacgactactacgtctggagcgacgagggcaaggaatacgccgacacccgcatcatcttcaccgacaccgaggtcagcaactggacgctcgacgagcaggcaggcaagtattactggcaccgctttttcgccagccagccggacctgaactacgacaacccgaaagtggtggaagaacttcacggcgccgcccgcttctggctcgacctcggcctcgacgggttccgggtggacgccgtgccctacctcatcgagcgcgagggcacgagctgcgagaatctgcccgaaacacacgagattctcaagggcttccgggcgatggtggaccgcgagtatccggggcggctgctgcttgccgaggcgaaccagtggcccgaggaagtcgtcgagtacttcggcaccgaagccgagcccgagttccacatgtgcttcaacttcccggtgatgccccggctgtacatgagcctgaaaagggaggacacctccagcatccgcgagatcatgggccgcctgccgaaaatcccgagtttcggccagtggtgcaccttcctgcgcaaccacgacgaactgacgctggaaatggtcaccgacgacgagcgcgccttcatgtatgccgcctacgcgcccgacgcccgcatgaaaatcaacgtgggcatccgccgtcgcctcgcgccgctgctcgacaacgaccggcgccgcatcgagctgctgaacactgtgctcctcgccctgcccggcagccccatcctgtactacggcgacgaaatcggcatgggcgacgacctcggcctgcccgaccgcaacggcgtgcgcaccccgatgcagtggaacgcgggcaccagcggcggtttttccactgcgcagccctccgactgctttttcccgccgattcaggacccggtgtacggcttcgggcgcgtcaacgtgcagagccagctccaagaccccagcagcctgctgaagtggaccgcccggcaactcgaactgcgccgcgcccaccccgcctttgcgcacggcgacctcaccttcatcgaaaccggcaaccccgccatcctcgcctttacccgccagtacgacggcgaaacgctgctcatcgtcagcaacttcgcgggcaacgcccaggccgggctgctcgatctcgcgcccttcgtgggccgcgccccggtcacactttccggggccagcccgctgccggtggtcactggaaacggccagtacccggtggtgatgggcaagtacgactattactggctgcggttgaattga

SEQ ID NO: 28 - protein, 552 aa, Deinococcus radiodurans R1
MTQAHPEWYKSAVFYELSVRTFQDGNGDGKGDFPGLTSRLDYLKNLGVDCLWLLPWFPSPLRDDGYDVADYRGIHPDLGTLDDFKVFLREAHARGLRVIGDLVTNHTSSDHPWFQAARRGPTLPDGSPNEYHDYYVWSDEGKEYADTRIIFTDTEVSNWTLDEQAGKYYWHRFFASQPDLNYDNPKVVEELHGAARFWLDLGLDGFRVDAVPYLIEREGTSCENLPETHEILKGFRAMVDREYPGRLLLAEANQWPEEVVEYFGTEAEPEFHMCFNFPVMPRLYMSLKREDTSSIREIMGRLPKIPSFGQWCTFLRNHDELTLEMVTDDERAFMYAAYAPDARMKINVGIRRRLAPLLDNDRRRIELLNTVLLALPGSPILYYGDEIGMGDDLGLPDRNGVRTPMQWNAGTSGGFSTAQPSDCFFPPIQDPVYGFGRVNVQSQLQDPSSLLKWTARQLELRRAHPAFAHGDLTFIETGNPAILAFTRQYDGETLLIVSNFAGNAQAGLLDLAPFVGRAPVTLSGASPLPVVTGNGQYPVVMGKYDYYWLRLN

SEQ ID NO: 29 - DNA, 1824 bp, Mycoplasma pulmonis UAB CTIP
  CDS (1)..(1824): transl_table=4
atgtataaaaaaatatttatctttttaacaccacttttgttacttactcaaacaataactatttcttgtattaataaaaatgaaaaaaattgaggtgacaaaaattttaaaaaaaatattgaaaaagaaaatttaaataatttaacttatgttgataaatcactagaggcaaaaaatgaagcaccttttattgaaaaacaaaaatcaaatgtaatttatcaactaactgtttattcttttgcagatggaaataatgatggaattggtgattttataggacttaaaaataatattgactattttgtaaaacttggaatcaatacactctatctttctcccattcatcctgctagttcatatcatggttatgatgtaattgattatcttgatgttgcccctgaacttggtggtatggaggcttttaaagaatttttaaaagtatctcatgcaaatggtattaaagttgtaatggatttagtgtttaatcactcttcttttgagcatccatgatttcaagaagcactaaatggaaacactaagtatcaaaattattattattttttagatgaaaatatttcaaaggatacacaaggtcttggaattgatagtcaagatctaagaaatcaatttaaaaatcttaaaaataaacaagcaagcaataaaaaatatgttgcacatttttgaccaggaatgcctgatttaaatttaaataattctgatttaattaaagagttaaaagctattcaaagatattgatcaaaaattggagttgatggttttcgttatgatgctttttatcatttttttgatagtaataatcaacataaaccaagagaaaatggtaatcaaaaaattaattcaatttttcaaaaattaagatcaactaataaagaagcaataaatgataatactcaaagatcatctaaagaaccatttttatttggtgagtgatgaaaatctccttttgaagcaaatgactatcttgatattaaaaatcaaggattagatagtgtcattgatggacgtaattgaaaagataatattaatgtttcaattaatgcaaaagaacaaagagcattattggaatttttaaacaaaaataattcaacttgaatgccttttttagacaaccatgatgttgaaagatgaattaacaaagtaagaagacaaattaataaaaatgtagcatcagttgataagcttagtgaattagaaatttcactaatgaaatatgctcttgtatctttgctttcaagagctggaagcccaatcttatataacggaaatgagcttaatttacatggaggacccaaacaagctggagatcattttgtaagagaggcttttccttgaaaagatagaacaaaacaagttgatttttatgaattaagatcaggaaaagaaaatagtagaatttttttgaatttatctaaaaatgaagaaaaaatagaagatgccataaaaaatgaaaattcaacttttaatcttgttaaacaactaaatgaaattagaaataaatatcaatatgttgtttctcaagatcccaatacaattgctgatttagaagagattttgagtgaaagtgaaattagaaaatatcaaaacaacttaaatttaagaaaaaacaatcaaggagaatatttactttatatttttggatgaggaaacaatgatatttcttttaaaatcaaaaacaattttaaaattgatcaaatcttattgcaaaaaaatataaatataaatactcaaacaagagaaatttcttctagtggaataggtacttatgctgttttaaaaattaataaaaaaagtgaggcaatttaa

SEQ ID NO: 30 - protein, 607 aa, Mycoplasma pulmonis UAB CTIP
MYKKIFIFLTPLLLLTQTITISCINKNEKNWGDKNFKKNIEKENLNNLTYVDKSLEAKNEAPFIEKQKSNVIYQLTVYSFADGNNDGIGDFIGLKNNIDYFVKLGINTLYLSPIHPASSYHGYDVIDYLDVAPELGGMEAFKEFLKVSHANGIKVVMDLVFNHSSFEHPWFQEALNGNTKYQNYYYFLDENISKDTQGLGIDSQDLRNQFKNLKNKQASNKKYVAHFWPGMPDLNLNNSDLIKELKAIQRYWSKIGVDGFRYDAFYHFFDSNNQHKPRENGNQKINSIFQKLRSTNKEAINDNTQRSSKEPFLFGEWWKSPFEANDYLDIKNQGLDSVIDGRNWKDNINVSINAKEQRALLEFLNKNNSTWMPFLDNHDVERWINKVRRQINKNVASVDKLSELEISLMKYALVSLLSRAGSPILYNGNELNLHGGPKQAGDHFVREAFPWKDRTKQVDFYELRSGKENSRIFLNLSKNEEKIEDAIKNENSTFNLVKQLNEIRNKYQYVVSQDPNTIADLEEILSESEIRKYQNNLNLRKNNQGEYLLYIFGWGNNDISFKIKNNFKIDQILLQKNININTQTREISSSGIGTYAVLKINKKSEAI

SEQ ID NO: 31 - DNA, 1806 bp, Mycobacterium tuberculosis CDC1551
  CDS (1)..(1806): transl_table=11
atgaacgaggcagaacacagcgtcgagcaccctcccgtgcagggcagtcacgtcgaaggcggtgtggtcgagcatccggatgccaaggacttcggcagcgccgccgccctgcccgccgatccgacctggtttaagcacgccgtcttctacgaggtgctggtccgggcgttcttcgacgccagcgcggacggttccggcgatctgcgtggactcatcgatcgcctcgactacctgcagtggcttggcatcgactgcatctggttgccgccgttctacgactcgccgctgcgcgacggcggttacgacattcgcgacttctacaaggtgctgcccgaattcggcaccgtcgacgatttcgtcgccctggtcgacgccgctcaccggcgaggtatccgcatcatcaccgacctggtgatgaatcacacctcggagtcgcacccctggtttcaggagtcccgccgcgacccagacggaccgtacggtgactattacgtgtggagcgacaccagcgagcgctacaccgacgcccggatcatcttcgtcgacaccgaagagtcgaactggtcattcgatcctgtccgccgacagttctactggcaccgattcttctcccaccaaccggatctgaactacgacaaccccgccgtgcaagaggcgatgatcgacgtcatccgcttttggctcggcttgggcatcgacgggtttcggttggacgcggtgccctatctctttgaacgtgagggcaccaactgcgagaacctgccggaaacacacgcttttctcaagcgagtccgcaaggtggtggacgacgaattccccggccgggtgctgctagccgaagccaatcagtggccgggcgatgtcgtcgaatatttcggtgatcccaacaccggtggcgacgagtgccacatggcctttcacttcccgctgatgccgcgcatcttcatggccgtgcgccgggagtcccgttttccgatctcggagatcatcgcccagaccccaccaatccctgacatggcgcaatgggggatatttctgcgcaaccacgacgagctgacgttagaaatggtcaccgacgaagagcgcgactacatgtacgccgagtacgccaaggatccacggatgaaggcgaatgtcggaatccgtcgtcggcttgcgccgctgctcgacaacgaccgcaaccagatcgagctgttcaccgcgctgctgctgtcgctgcccggctcgccggtcctctactacggcgacgagatcgggatgggcgacgtgatctggttgggtgatcgcgacggcgtgcgcatcccgatgcagtggacaccggaccgcaacgcgggtttctccaccgccaacccgggtcggctgtacctgccgcccagccaggacccggtttacgggtatcaggccgtcaacgtcgaggcgcaacgcgacacctcgacgtcgctgctcaacttcactcgcaccatgctggccgtgcgtcgccgacaccccgcgtttgcggtcggcgcattccaggaattgggcgggtccaacccgtcggtgctggcctacgtgcgtcaggtggccggcgatgacggcgacaccgtgctctgtgtcaacaacctgtcgcgattcccgcagcccatcgaattggacttgcagcaatggaccaactacacgccggtcgagctgaccgggcacgtggagtttccacgcatcggccaggtgccctatctgctgacgctgccaggacacgggttctactggttccagttgaccacacatgaggtgggggcacctcccacttgcgggggagagcggcgcctatga

SEQ ID NO: 32 - protein, 601 aa, Mycobacterium tuberculosis CDC1551
MNEAEHSVEHPPVQGSHVEGGVVEHPDAKDFGSAAALPADPTWFKHAVFYEVLVRAFFDASADGSGDLRGLIDRLDYLQWLGIDCIWLPPFYDSPLRDGGYDIRDFYKVLPEFGTVDDFVALVDAAHRRGIRIITDLVMNHTSESHPWFQESRRDPDGPYGDYYVWSDTSERYTDARIIFVDTEESNWSFDPVRRQFYWHRFFSHQPDLNYDNPAVQEAMIDVIRFWLGLGIDGFRLDAVPYLFEREGTNCENLPETHAFLKRVRKVVDDEFPGRVLLAEANQWPGDVVEYFGDPNTGGDECHMAFHFPLMPRIFMAVRRESRFPISEIIAQTPPIPDMAQWGIFLRNHDELTLEMVTDEERDYMYAEYAKDPRMKANVGIRRRLAPLLDNDRNQIELFTALLLSLPGSPVLYYGDEIGMGDVIWLGDRDGVRIPMQWTPDRNAGFSTANPGRLYLPPSQDPVYGYQAVNVEAQRDTSTSLLNFTRTMLAVRRRHPAFAVGAFQELGGSNPSVLAYVRQVAGDDGDTVLCVNNLSRFPQPIELDLQQWTNYTPVELTGHVEFPRIGQVPYLLTLPGHGFYWFQLTTHEVGAPPTCGGERRL

SEQ ID NO: 33 - DNA, 1641 bp, Mycobacterium tuberculosis CDC1551
  CDS (1)..(1641): transl_table=11
atggaccaacaccagcgaccggatccaatgggccccggctctcctcgcgccagcgctcgtcgaccggagccagatccgatgggcgagccgtggtggtcgcgagccgtgttctaccaggtctatccccgatcgttcgccgacagcaacggcgacggggtgggcgacctggacgggttggcgagccggcttgaccacctgcaacagctcggtgtcgacgcgatctggatcaacccggtcaccgtctcgccgatggcagaccacggatacgacgtcgccgatccccgcgacatcgacccactcttcggcgggatgccggcgttcgaacggttggtcgctgcggcacaccggcagggcatcaaagtcaccacggacgtggtgcccaaccacaccagttcggcgcacccatggtttcaggccgcgctggctgacctcccgggtagcccggcgcgggatcgctatttctttcgcgacgggcggggccccgacgggtcgctgccgccgaacaactgggagtcggtgttcggcgggccggcctggacccgagtgcgcgaaccggacggcaacccgggccagtggtacctgcaccttttcgacaccgaacagccggacctgaactgggacaacccggaaatccttgacgacttcgagaaaacactgcgcttctggctggaccgcggcgtggatggcttccgcatcgacgtggcgcacggcatggccaagcccccgggcctgccggactcaccggacctgggcatcgaggtgctgcaccaccgcgatgacgacccgcgcttcaaccacccgaatgtgcacgcgattcaccgcgacatccgcacggtgatcgacgagtaccccggagcggtaaccgtcggcgaggtgtgggtacacgacaacgcccgctgggcggagtatctgcggcccgacgaactgcatctcggcttcaatttccggctggcgcgaaccgagttcgacgccgccgagatccgcgacgcggtggcgaactccctggccgccgcggcgctgcagaacgcgaccccaacctggacgctggccaatcacgatgtgggacgggaggttagccgctacggcggcggcgagatcgggctgcgccgggccaaggcgatggcggtggtgatgctcgccctgccgggcgtggtcttcctctacaacggccaggaactgggtttgcccgacgtggacctgcccgacgaggtgctgcaggatccgacgtgggaacgctcgggacgcaccgaacgcggtcgcgatggctgccgggtgccgattccctggtcgggcaacattcccccgttcgggttctcgacgtgtccagacacctggttgccgatgccgccggaatgggcggcgctgaccgccgaaaaacaacgcgctgatgccggctcgaccttgtcgttttttcgacttgcactcagattacgtagggaacgaaatgaattcgacggcgacgtcgactggctggccgcgcccgacgatgcgctgatattccggcgtcacggcgggggtttggtgtgcgcgctcaacgccgctgagcgtccgctggcgctgccggcaggtgaacccatcctggccagcgcaccgttgaccgacgccacgttgccacccaatgccgcggcctggctggtgtag

SEQ ID NO: 34 - protein, 546 aa, Mycobacterium tuberculosis CDC1551
MDQHQRPDPMGPGSPRASARRPEPDPMGEPWWSRAVFYQVYPRSFADSNGDGVGDLDGLASRLDHLQQLGVDAIWINPVTVSPMADHGYDVADPRDIDPLFGGMPAFERLVAAAHRQGIKVTTDVVPNHTSSAHPWFQAALADLPGSPARDRYFFRDGRGPDGSLPPNNWESVFGGPAWTRVREPDGNPGQWYLHLFDTEQPDLNWDNPEILDDFEKTLRFWLDRGVDGFRIDVAHGMAKPPGLPDSPDLGIEVLHHRDDDPRFNHPNVHAIHRDIRTVIDEYPGAVTVGEVWVHDNARWAEYLRPDELHLGFNFRLARTEFDAAEIRDAVANSLAAAALQNATPTWTLANHDVGREVSRYGGGEIGLRRAKAMAVVMLALPGVVFLYNGQELGLPDVDLPDEVLQDPTWERSGRTERGRDGCRVPIPWSGNIPPFGFSTCPDTWLPMPPEWAALTAEKQRADAGSTLSFFRLALRLRRERNEFDGDVDWLAAPDDALIFRRHGGGLVCALNAAERPLALPAGEPILASAPLTDATLPPNAAAWLV

SEQ ID NO: 35 - DNA, 1356 bp, Clostridium acetobutylicum ATCC 824
  CDS (1)..(1356): transl_table=11
atgccttggtttaaaaaagcaattttttatcacatctatcctcttggtttatgcggagcacctttaagtaatgacttcacttctaaaccaataccaagacttaaggagatagaaaactggataccttatttaaaatcattaggaataactgctttatatcttggacctgtttttgaatccacatctcatggttatgatacagcagattactatacagtagatagaagactcgggacaaatgacactttaaaaaaacttataaataagcttcataaaaatggcatcaaggtagttttagatggtgtattcaatcatgttggaaggaacttcccccaatttatggatttgattataaataagcaaacttccagctttgctacttggttttctggtgttgattttaacagtaaaagtccttataatgatgatttttcctacgatacctggaatggttgttatgatttagtcaaactaaactttaacaataatgaggtgaaaagttttattttaaatgcaataaacttttggataagtgaattcaagatagatggtatccgccttgatgctgctgactgcatagatataaactttctaagagaaatatccaacttctcaaaaagcatatcagatgatttcttccttttaggggaaattatatttggtgattatacacgctttgcaagtaaaaatatattggactctgttaccaactacgagtgttacaagggactctattcaagtcataattcattaaattactttgagatagcttactctttaaatagacaatttggcgatggcggtatatataaaaatattccattatacaattttgttgataatcatgatgttaaccgtattgccagcactttaattgatgcagctaatatttatcctatatatactattttgtttacaatacctggtatcccatcaatttattacggaagtgattttggtataactggtgtaaaacaaaataactctgataagtatttaagacctagactaaaaattaatgaattaaaaaactctaaagaaaacaaacctttgaataattttataaaaaagctttgccatattcgaataaattctgaagcattaacagaaggtttatacaaacaacttttcatttcaaataaactatttgcttttttaagatataccgatagtgaaaaaataatagtagctttaaattgttctaaagaatgttctcaaatagagttctcaaatgatatgaatgctacttctttatttgatcttatagagaaaaaaagcttaaagctagaacctaatggaactataagtataaccttacaggaaaaccaagcaagaatatttaaagtaagtttctaa

SEQ ID NO: 36 - protein, 451 aa, Clostridium acetobutylicum ATCC 824
MPWFKKAIFYHIYPLGLCGAPLSNDFTSKPIPRLKEIENWIPYLKSLGITALYLGPVFESTSHGYDTADYYTVDRRLGTNDTLKKLINKLHKNGIKVVLDGVFNHVGRNFPQFMDLIINKQTSSFATWFSGVDFNSKSPYNDDFSYDTWNGCYDLVKLNFNNNEVKSFILNAINFWISEFKIDGIRLDAADCIDINFLREISNFSKSISDDFFLLGEIIFGDYTRFASKNILDSVTNYECYKGLYSSHNSLNYFEIAYSLNRQFGDGGIYKNIPLYNFVDNHDVNRIASTLIDAANIYPIYTILFTIPGIPSIYYGSDFGITGVKQNNSDKYLRPRLKINELKNSKENKPLNNFIKKLCHIRINSEALTEGLYKQLFISNKLFAFLRYTDSEKIIVALNCSKECSQIEFSNDMNATSLFDLIEKKSLKLEPNGTISITLQENQARIFKVSF

SEQ ID NO: 37 - DNA, 1785 bp, Agrobacterium tumefaciens str. C58
  CDS (1)..(1785): transl_table=11
ttgtcaccatcatcgtgccgcttggcgtcttcttcgcccttcaacgttatctcgtgcgtggcctgctcgcgggctccgtcaagggaggctgatcattccatgaacgcccataccagacaggacacttccatgaccgcttcggtgacttccgctttgacgcctaacaaggactggtggcgtggtgcggtgatctatcagatctacccgcgctcctatcaggactccaatggcgacggcatcggcgatctcaagggcattaccgaccgtctgcatcacatcgccggtctcggtgccgatgcgatctggatttcgccctttttcacctcgccgatgaaggatttcggctacgacgtctcgaactatgtcgatgtcgatccgatgttcggcacgcttgccgatttcgacgggctgattgccgaagcccaccggcttggcatccgcgtgatgatcgacctcgttctgtcgcacacgtctgaccagcatccgtggttcgtggaaagccgcgccagccgcaacaatccgaaatcggactggtatgtctggtcggaagcgaagcccgatggcacaccgcctaacaactggctgtcgatcttcggcggttccggctggcagtgggatcccacccgcatgcaatattacatgcacaacttcctgacctcgcaaccggacctcaacctgcataaccctgaagtgcaggaggaactgcttaatatcacccgcttctggctgaagcgcggcgtcgatggtttccgcctcgacactatcaacttctatttccatgatctggaattacgagacaacccggcgctggcaccggagcgccgcaatgcctcgaccgcgcctgcagtcaatccctacaatttccaggaacatctctacgataagaaccgcccggaaaacatcgccttcctgaagcgcttccgcgcggtgctggacgaattccccgatatcgccgccgttggcgaagtgggcgacagccagcgcggtctcgaaatcgtcggtgaatacacctccggcgatgacaagatgcagatgtgctatgccttcgaattcctcgcacccgatgcgctcaccccccagcgcgttgccgatgtgcaggcggattttgcgcgcgcagcaccagagggctgggcctgctgggccttctccaaccatgatgtcgtgcgccatgtcagccgctggggcgagcatgtcgaggacaaggatgccttcgcgaagctgctgtcggcactgctgatgacgcagcgaggctccgtctgcatctatgagggcgaggaactgggcctcactgaagccgatattgctttcgaggacttacaggacccctatggcatccagttctggccggaattcaagggtcgcgatggttgccgcacgccgatggtgtgggatgcgggccatgcgcaggccggcttttcgacttcggacaagatctggctgcccattccggccgagcacaagcagcgcgccgtcagcgcccagcagggcaacgaggcgtcggtgctggagcattaccgccgcttcctcgccttccgcaaacagcacccggctttcgccaagggcggcatcgaattccagccgcttgagggagacgtgctgagctacacccgcaagctgggcaacgaaaccattctgtgccttttcaatctgtccgcaacgccggcaaatgccacgctgccgaaagggaactgggaggttctcgaaggccatggctttgcaagcggccttgaaggcacaagcgtagaacttccggcatggggcgctttcttcgcccgttacgcctga

SEQ ID NO: 38 - protein, 594 aa, Agrobacterium tumefaciens str. C58
MSPSSCRLASSSPFNVISCVACSRAPSREADHSMNAHTRQDTSMTASVTSALTPNKDWWRGAVIYQIYPRSYQDSNGDGIGDLKGITDRLHHIAGLGADAIWISPFFTSPMKDFGYDVSNYVDVDPMFGTLADFDGLIAEAHRLGIRVMIDLVLSHTSDQHPWFVESRASRNNPKSDWYVWSEAKPDGTPPNNWLSIFGGSGWQWDPTRMQYYMHNFLTSQPDLNLHNPEVQEELLNITRFWLKRGVDGFRLDTINFYFHDLELRDNPALAPERRNASTAPAVNPYNFQEHLYDKNRPENIAFLKRFRAVLDEFPDIAAVGEVGDSQRGLEIVGEYTSGDDKMQMCYAFEFLAPDALTPQRVADVQADFARAAPEGWACWAFSNHDVVRHVSRWGEHVEDKDAFAKLLSALLMTQRGSVCIYEGEELGLTEADIAFEDLQDPYGIQFWPEFKGRDGCRTPMVWDAGHAQAGFSTSDKIWLPIPAEHKQRAVSAQQGNEASVLEHYRRFLAFRKQHPAFAKGGIEFQPLEGDVLSYTRKLGNETILCLFNLSATPANATLPKGNWEVLEGHGFASGLEGTSVELPAWGAFFARYA

SEQ ID NO: 39 - DNA, 1608 bp, Streptococcus pneumoniae R6
  CDS (1)..(1608): transl_table=11
atgcaagaaaaatggtggcataatgccgtagtctatcaagtctatccaaagagttttatggatagtaatgaagatggagttggtgatttgccaggaattaccagtaagttggactatctagccaagctaggaatcacagcaatttggctttctcccgtttatgacagccctatggatgataatggctatgatattgctgattatcaagcgattgcggctatttttggaaccatggaggacatggatcagctgattgcagaagctaagaagcgtgatatccgtatcatcatggacttggtggtcaatcatacctcggatgagcatgcctggtttgtagaggcctgtgaaaatcctaatagccctgagcgagactactatatctggcgggatgagcctaacgatttagattctatttttagtggatctgcttgggaatacgatgaaaaatctggtcaatactatctccactttttcagcaagaaacagccggatctcaattgggaaaatgaaaaacttcgccagaaaatttatgagatgatggacttctggattgataaaggtattggtggtttccgtatggatgttattgacatgattggcaaaattcctgacgagaaggtagtcaataatggtcctatgctccatccctatctcaaggaaatgaatcaggcgacctttggagataaggatctcttgacagtaggggagacttggggagcaacgccagagattgccaagctctactctgatccaaaggggcaagaattgtctatggtcttccagtttgaacatatcggtcttcagtatcaggaaggtcagcctaaatggcactatcaaaaagagctgaatatcgctaagttaaaagaaatcttcaacaaatggcagacagagttaggagttgaggacggttggaattccctcttctggaacaatcatgacctccctcgtattgtctcaatctggggaaatgaccaagaataccgcgaaaaatctgccaaagcctttgcaatcttgcttcatcttatgagaggaactccttatatctaccaaggtgaggagattgggatgaccaactatccgtttgaaacactggatcaagtagaagatattgaatctctcaactatgcgcgtgaggctcttgaaaaaggtgttccgattgaagaaatcatggacagtatccgtgttattggacgtgacaatgcccgtacccctatgcaatgggacgagagcaaaaacgctggtttctcaacaggtcaaccttggttggcggttaatccaaattacgagatgatcaacgtccaagaagcgctggcaaatccagattctattttctatacctatcagaaactggtccaaattcgcaaggagaatagctggctaattcgagctgactttgaattgcttgatacggctgataaggtctttgcttatatacgtaaggatggcgaccgtcgcttcctagttgtggctaacttgtccaatgaagagcaagacttgacagtagaaggaaacgtcaaatctgtcttgattgaaaacaccctagctcaagaagtctttgaaaaacaaatcttagttccatgggatgctttctgtgtggaattactataa

SEQ ID NO: 40 - protein, 535 aa, Streptococcus pneumoniae R6
MQEKWWHNAVVYQVYPKSFMDSNEDGVGDLPGITSKLDYLAKLGITAIWLSPVYDSPMDDNGYDIADYQAIAAIFGTMEDMDQLIAEAKKRDIRIIMDLVVNHTSDEHAWFVEACENPNSPERDYYIWRDEPNDLDSIFSGSAWEYDEKSGQYYLHFFSKKQPDLNWENEKLRQKIYEMMDFWIDKGIGGFRMDVIDMIGKIPDEKVVNNGPMLHPYLKEMNQATFGDKDLLTVGETWGATPEIAKLYSDPKGQELSMVFQFEHIGLQYQEGQPKWHYQKELNIAKLKEIFNKWQTELGVEDGWNSLFWNNHDLPRIVSIWGNDQEYREKSAKAFAILLHLMRGTPYIYQGEEIGMTNYPFETLDQVEDIESLNYAREALEKGVPIEEIMDSIRVIGRDNARTPMQWDESKNAGFSTGQPWLAVNPNYEMINVQEALANPDSIFYTYQKLVQIRKENSWLIRADFELLDTADKVFAYIRKDGDRRFLVVANLSNEEQDLTVEGNVKSVLIENTLAQEVFEKQILVPWDAFCVELL

SEQ ID NO: 41 - DNA, 1764 bp, Streptococcus pneumoniae R6
  CDS (1)..(1764): transl_table=11
atgaatactttaggagacaaattgatggaattgagtgctatttaccatgggcctgagtcggagtatgcctatctttataaggataagaaactccatattcgaattcgaactaagaaaggggacattgaaagcatcaacttgcactatggggacccttttatctttatggaggagttttatcaggatacaaaagaaatggtcaagataacttctggtaccttatttgaccattggcaggttgaagtgtcagttgactttgcacgtatccagtatctctttgagctcagagatacagaaggtcaaaatattttgtatggcgataaagggtgtgtggaaaattctctagaaaatcttcatgcaattgggaatggatttaagttgccttatcttcatgagattgatgcctgcaaggttcctgactgggtttcaaatacggtatggtatcagatatttcctgaaagatttgccaatggcaatgctctattaaacccagaagggactttagactgggattcatctgtcacacctaagagcgatgatttctttggtggtgatttacaggggattattgatcatatggattacttgcaagacttgggtattactggactatatctttgtcccatctttgaatctacaagcaatcacaagtacaatacgacagattactttgaaattgaccgtcattttggagacaaggagacctttcgggaactggtggatcaagcgcatcatcgtggcatgaaagtcatgctggatgcggtatttaatcatattgcttcgcaatctcttcaatggaaaaatgtcgtcaaaaatggtgaacagtctgcttataaggattggttccatattcaacaattcccagtgacaactgaaaagctagttaataagagagacttaccctatcatgtttttggtttcgaggactatatgcctaagctaaatacagccaatccagaggtcaagaattatcttttaaaggttgcgacttattggattgaagagtttaatatcgatgcttggcgtttggatgtggctaatgagattgaccatcagttctggaaggattttcgtaaggcagttttagctaaaaatcctgatctttatatcctaggagaagtctggcatacatctcagccttggctaaatggagatgagttccatgccgtcatgaattatcctttatctgatagtatcaaggactatttcttacgaggaattaagaagacagaccagttcatcgatgaaatcaatggagagtctatgtattacaagcagcagatttcagaggtcatgtttaatctcttggattcacatgatacagagcgaatcctgtggacggccaatgaagatgttcaactggttaaatcagccttagcctttctctttttacaaaaaggaacaccgtgcatttattacgtaaccgagctagccttgactggaggaccagatccagattgtcgtcgttgtatgccttgggaacgtgtatcaagtgacaatgatatgctgaactttatgaagaggctgattaagattcggaaatacgcgtcagtaatcatttcgcatggcaagtatagccttcaagaaatcaactctgatctagtagctctggaatggaaatacgaaggacggatcctcaaagcaatattcaaccaatcaacagaagattatcttttagagaaagaagcagtagcactagcaagcaattgccaagaattggataatcagcttgtcatctctccagatggatttatgattttctaa

SEQ ID NO: 42 - protein, 587 aa, Streptococcus pneumoniae R6
MNTLGDKLMELSAIYHGPESEYAYLYKDKKLHIRIRTKKGDIESINLHYGDPFIFMEEFYQDTKEMVKITSGTLFDHWQVEVSVDFARIQYLFELRDTEGQNILYGDKGCVENSLENLHAIGNGFKLPYLHEIDACKVPDWVSNTVWYQIFPERFANGNALLNPEGTLDWDSSVTPKSDDFFGGDLQGIIDHMDYLQDLGITGLYLCPIFESTSNHKYNTTDYFEIDRHFGDKETFRELVDQAHHRGMKVMLDAVFNHIASQSLQWKNVVKNGEQSAYKDWFHIQQFPVTTEKLVNKRDLPYHVFGFEDYMPKLNTANPEVKNYLLKVATYWIEEFNIDAWRLDVANEIDHQFWKDFRKAVLAKNPDLYILGEVWHTSQPWLNGDEFHAVMNYPLSDSIKDYFLRGIKKTDQFIDEINGESMYYKQQISEVMFNLLDSHDTERILWTANEDVQLVKSALAFLFLQKGTPCIYYVTELALTGGPDPDCRRCMPWERVSSDNDMLNFMKRLIKIRKYASVIISHGKYSLQEINSDLVALEWKYEGRILKAIFNQSTEDYLLEKEAVALASNCQELDNQLVISPDGFMIF

SEQ ID NO: 43 - DNA, 1851 bp, Thermoplasma acidophilum DSM 1728
  CDS (1)..(1851): transl_table=11
atgattgatattgaaatcggcggagatgcgccatttttcaggaagatcaaggtgcatctaggcaaaatagatgcaagtaccgcttatgtcgaaggtacgttcaactgtcagggcgagggcagcatagtcctggaggggaacagcgaatcgacagatgaagtggatggcctcgttccagataaatacgaatttaggatagctctcgatcagtaccggtttctgaggaatagccagtcaagatctaacatgttccaggtatcattatggcttgatgctgtgtatcacgatcctgatctttctcaattttcctgcatacttgacgataggttgatggatattaggatagctgtgcccaagcaggtggtctcggttcgtattttaactgaatcggaggttaaggtggtctattccagaagatcatcccaggcgacctacgacattgttgaatttgttatttcaggagtatctgggtatgcctttgaggtggatcaggtgagatatccggatcatggatactacagatcaaccaaaaggataaactcagagggtaactcgaagataatgtaccatatattcccagatcgtttccatcgttatggtgaagatcgtccgggcctcataaaatggggcgagaagccgtctcgcgactcattcttcggcggtaatctggaaggtataaggcagaagatccagtatatcaaggatctcagggtggatcacatatacctgaatcctctattcaaaagcaaatccaatcacaggtacgatgttgatgattattacagcatcgatgagttgttgggtacggatcaggatctgaagaatctcgtatcagatgcccatgcaagcggtataaaaatagttcttgatatggtcttcaatcacacttcaaccgacttcccggccttcagagatgtaatagagaagggcaggaattcaccttattacagatggtacatattccacagggatgaattcacagtattcaggggaagaggaaagagaggtagttatccgtcctatgagacgttcatggggtacggaggcatgccgaagcttgatcacagaaatcctgaggtgaggcgatactgcataaatgtcctgaaatattatgtgcagaagttcgatgtagatggattccgctacgatgtggcgcattccatatacagcaaattcttcgaggaggtcttcagtgagatcggtaccggaattttgcacataggggaggcgtggtgcctgcccacctaccttgtgaacggatcagcatggcagagctatacaaattatttcctaggcggatccatcatcgattttttgaagggatcgataacgctgggagaattctacgatagggtgcagagaatgctgatcgtcaatggtatagagaaacagcaggccatgatgaatgttttggattctcatgataccccaaggatcttaaggatcctgaatggagacaggaagaaggttaagctggcctactcgatactctatctgttcgatggtatagcaacaatctactatggcgatgaggttggtctggatggcggaaaggatccggacgacaggagatgcttcccgtgggattctatggatgaagatatgcacagcttcttcatgaacttgggtgatctgagagaaaaatacagtcttggatcagctggcgtgataacggtctttgaggacgaagcatcattcgtcatagagaaggtcaaggctggcagatccatatccgtacatatggcaaagaatgggcgcatgaaatttccgaaagactcattaatcgctgtgagggagaatcagaaagaagtcaagccatgggatttctatatatatctccgtacagtctaa

SEQ ID NO: 44 - protein, 616 aa, Thermoplasma acidophilum DSM 1728
MIDIEIGGDAPFFRKIKVHLGKIDASTAYVEGTFNCQGEGSIVLEGNSESTDEVDGLVPDKYEFRIALDQYRFLRNSQSRSNMFQVSLWLDAVYHDPDLSQFSCILDDRLMDIRIAVPKQVVSVRILTESEVKVVYSRRSSQATYDIVEFVISGVSGYAFEVDQVRYPDHGYYRSTKRINSEGNSKIMYHIFPDRFHRYGEDRPGLIKWGEKPSRDSFFGGNLEGIRQKIQYIKDLRVDHIYLNPLFKSKSNHRYDVDDYYSIDELLGTDQDLKNLVSDAHASGIKIVLDMVFNHTSTDFPAFRDVIEKGRNSPYYRWYIFHRDEFTVFRGRGKRGSYPSYETFMGYGGMPKLDHRNPEVRRYCINVLKYYVQKFDVDGFRYDVAHSIYSKFFEEVFSEIGTGILHIGEAWCLPTYLVNGSAWQSYTNYFLGGSIIDFLKGSITLGEFYDRVQRMLIVNGIEKQQAMMNVLDSHDTPRILRILNGDRKKVKLAYSILYLFDGIATIYYGDEVGLDGGKDPDDRRCFPWDSMDEDMHSFFMNLGDLREKYSLGSAGVITVFEDEASFVIEKVKAGRSISVHMAKNGRMKFPKDSLIAVRENQKEVKPWDFYIYLRTV

SEQ ID NO: 45 - DNA, 1527 bp, Synechocystis sp. PCC 6803
  CDS (1)..(1527): transl_table=11
gtgccccaccattacgacagggtaaatattaacaaattattaacaaggactagaatcaccatggttacaaccccagattgggtgaaaaaagccgttttctatcaaatttttcctgaccgttttgccatcggccaacaacaggcgatcgccgtcgctcaacaaccaaagctagaaccatgggaggccccgccaacggtgcagggttataaggggggcaacctgtggggagtgatcgaacatttggattatctccaggattcgggcattaccgctttatacttgacccccattttccagtccgcctgtaatcaccgttatcacacccatgactattaccaagtggatcctctactggggggcaacgaggcgttgcaggctttactaacccaggcccaccgccgggagatgaaagtagtcttggatggagtgtttaaccatgccagcaggggtttctactttttcaacgacattttggaaaatggcccccattctccttggttagattggtttcacattgaagattggcccctatcagcctatgacggttctctgccagctaactatcggggctgggtagatttgcgggccctgccccagtttaaccatgaccatcccgacgtacgggaatatttgatgcgggtgggggagtattggattgcccagggcattgatggttggcgtttggatgtgcccgattgtgtcaaagcggaaggtttttggcaagaattccgctgcagggtcaaggccattaatccagaagcctacattgtgggggaaatttggtgtgatgctagcccctggttagccggagatcaattcgatggggtgatgaactatcgctttaccgaacctaccgtagcttttgccattggcgatcgcctgcaaaaagaacatctacggggggaagaatatcgtccttacccagccctaactgcagaagcctatggggaaagaattagccaactgctgcaacaacatccctgggaaattcagttaacccaattaaatttactcaacagccacgacaccgcccgcttattaaccctagccaatggcgatcggcccagcgttaacctcgctcttttactgatgtttactttccccggtgctccctgtgtttactacggagacgaagtgggtttgcctggggaggccgaccccgattgtcgccgagtttttcctgctaaaactgactgggacttggattgttgggaattctaccgccaattgattgccctgcgccatcgctatcaatgtttgcaattgggggattacaaaattatcgccacggcaggtatgggctatgtttttcaacggcaatacggcgatgaaaccctaatggttgccgttaatagtggtgacaacataatagaaattatattatctccagacataataaatttggataaaatagacatagctgaacctgtatttagcgctaatggtgagaccgtaattgaccggaacaccgcagggttacttttgaccatggcccctcaatcaggagcagctttcgccatcatttga

SEQ ID NO: 46 - protein, 508 aa, Synechocystis sp. PCC 6803
MPHHYDRVNINKLLTRTRITMVTTPDWVKKAVFYQIFPDRFAIGQQQAIAVAQQPKLEPWEAPPTVQGYKGGNLWGVIEHLDYLQDSGITALYLTPIFQSACNHRYHTHDYYQVDPLLGGNEALQALLTQAHRREMKVVLDGVFNHASRGFYFFNDILENGPHSPWLDWFHIEDWPLSAYDGSLPANYRGWVDLRALPQFNHDHPDVREYLMRVGEYWIAQGIDGWRLDVPDCVKAEGFWQEFRCRVKAINPEAYIVGEIWCDASPWLAGDQFDGVMNYRFTEPTVAFAIGDRLQKEHLRGEEYRPYPALTAEAYGERISQLLQQHPWEIQLTQLNLLNSHDTARLLTLANGDRPSVNLALLLMFTFPGAPCVYYGDEVGLPGEADPDCRRVFPAKTDWDLDCWEFYRQLIALRHRYQCLQLGDYKIIATAGMGYVFQRQYGDETLMVAVNSGDNIIEIILSPDIINLDKIDIAEPVFSANGETVIDRNTAGLLLTMAPQSGAAFAII

SEQ ID NO: 47 - DNA, 1818 bp, Salmonella typhimurium LT2
  CDS (1)..(1818): transl_table=11
atgttgaatgcctggcacttaccggttgccccatttgtgaagcaacataacgataaattaaccattacgctgtggctgagcggagaaaatccgccgtctcgcgtgacgttgcgctcagaattcgataatgaagaaatctcactggcgatgcgcaaacagcgccgccagccgcagccgggcgtgacggcgtggcgagcgacgctcaatatcgcgttagggcaaccccgtcgccgttacagctttaaattgctttggcatgaccgccagctttggtttacgccacagggatttagccgttttccgcctgcgcgtctggaacaatttgcggttgatgtgccggatagcggcccgcagtgggtcgccgatcaaattttttatcagatcttcccggatcgttttgcccgcagccagtctcgtgaagccgggcaggaccgggtgtactaccatcatgccgcaggtcaggagattgtgctgcgcgactgggacgatcctttaaccccccaggcgggcggttccaccttttacggcggctgtctgaatggcatttgtgagaagctgccgtatctgaaaaaactgggcgtcacagcgctatatctgaatccggtatttaccgcgccgagcgtccataagtacgatacggaagattatcgccatgtcgatccgcaatttggcggcgatcgggcgctgctacgcctgcggcgtaaaacccaggtgcagggcatgaggctggtgctggatggcgtgtttaatcatagcggcgactcgcatgtgtggtttgacaggcataaccgcagcactggcggcgcgtgccatcacccggactcgccgtggcgcgactggtactccttttcaccacaaggcgtggcgctggactggctgggttatccgagcctgccgaaactcgattatcaatcagaaacgctggtcgatgagatctatcgcggtgaggacagtatcgttcgtcactggctaaaggctccgtggaatatggacggctggcggctggatgtcgtacatatgctgggcgaggcgggcggggcgcgtcataatttgcagcacgtcgccggtattacccgggcggcaaaagaggcgcagcccgaagcctatattgtgggggaacatttcggcgatgcgcggcagtggctacaggccgatgcggaagatgccgccatgaattatcgcggcttcaccttcccgctatggggatttctcgccaatactgatatcgcttacgaaccacagcatattgatgcccggacctgtatcgcgtggatggataactaccgcgccgggctgtcacatcagcaacaactgcgcatgtttaatcaactcgacagccatgatactgcgcgctttaaaactctgctgggtaaagacgcggcgcgcctgccgctggcggtggtctggctgtttacctggcccggcgtgccatgtatttattacggcgatgaagtcggcgtggacggcgcaaatgaccccatgtgccgcaaaccgttcccatgggatgaacgcaagcaggacggcaacttgctggcgctgtaccagcgtatggcgaaactgcgccagagcagtctggcgctgcgtcgtggcggatgccaggcgctgtatgccgaaggtgacgtagtggtattcgtgcgagtttatcagcagcagcgggcgctggtggcgattaaccggggcgaggcctgtgaagtggcgctggaagcgttgccgttgctgaacgtggccggatggcaatgtaaaacgggaagcggtgatatccgcgagggaagacttagtttacccgcgatttccgcgacggtatggatgaatcgttga

SEQ ID NO: 48 - protein, 605 aa, Salmonella typhimurium LT2
MLNAWHLPVAPFVKQHNDKLTITLWLSGENPPSRVTLRSEFDNEEISLAMRKQRRQPQPGVTAWRATLNIALGQPRRRYSFKLLWHDRQLWFTPQGFSRFPPARLEQFAVDVPDSGPQWVADQIFYQIFPDRFARSQSREAGQDRVYYHHAAGQEIVLRDWDDPLTPQAGGSTFYGGCLNGICEKLPYLKKLGVTALYLNPVFTAPSVHKYDTEDYRHVDPQFGGDRALLRLRRKTQVQGMRLVLDGVFNHSGDSHVWFDRHNRSTGGACHHPDSPWRDWYSFSPQGVALDWLGYPSLPKLDYQSETLVDEIYRGEDSIVRHWLKAPWNMDGWRLDVVHMLGEAGGARHNLQHVAGITRAAKEAQPEAYIVGEHFGDARQWLQADAEDAAMNYRGFTFPLWGFLANTDIAYEPQHIDARTCIAWMDNYRAGLSHQQQLRMFNQLDSHDTARFKTLLGKDAARLPLAVVWLFTWPGVPCIYYGDEVGVDGANDPMCRKPFPWDERKQDGNLLALYQRMAKLRQSSLALRRGGCQALYAEGDVVVFVRVYQQQRALVAINRGEACEVALEALPLLNVAGWQCKTGSGDIREGRLSLPAISATVWMNR

SEQ ID NO: 49 - DNA, 1662 bp, Listeria monocytogenes EGD-e
  CDS (1)..(1662): transl_table=11
atgaaagaaaaagattggtggaaaaaaagcgtagtgtaccaaatctatccaaagagttttaatgattcgaatggtgatggagttggtgatattcaaggaattatcgagaaattagattatttaaaagagcttggtgtagacgttatctggttgtccccggtgtacgattcgccgcaagatgacaatggttacgatattcgcgattatcaaaaaatttacgaagaatatggtgacatggcgacttttgatcaattgcttcaaggtttacacgaccgcgatatgaaactcgtgatggacttagttgttaaccatacttctgatgaacataagtggtttgaagaatctcggaaatccaaagataacccatatcgcgattactatttctggcgcgaggaaaacgaaatcaacaactggggttccattttcagcggtccagcatgggaattagacgaaaaaacaggcgagtactatttacacctgttctccaaaaaacaacctgatttaaactgggaaaaccctaaattacgccaagatgtatataatatgatgaaattctggctagataaaggcattgatggtttccgcatggacgtaattaattttatttccaaaaacaccgatttcccagatggtccagtgccagatggtcaaatttacggcgatgctggcaatgatttctgcaatggaccgcggattcatgagttcttgcaagaaatgaaccaagaagttacttccaaatacgatgtgatgactgttggtgaaatgcctggtgctagtacaactgacgcgcagatttatacgaatccagcaaataacgaagtcgatatgatttttacatttgaacatatgaacttagattccgatagcgacaataaatgggatttgaaaccaatttacttaccagatttaaaagaaaacatgtccgaatggcaagtggcgcttcaagaaaatggctggaacagcttatactggaacaatcatgaccaaccacgaatcgtttctcgcttcggaaatgacaatcgtttccgcgttcgttcagcgaaaatgctcgcaacttgtctgcatatgatgaaaggaacgccgtacatttatcaaggtgaagaaatcgggatgacgaatgttcattttgaaacgctagatgattatcgtgatatcgaaacgctaaacatgtacaaagaacgcaaagagcaaggccacagtcacgaaagtatcatgcagtcgatttacacaaaaggtcgcgacaatgcgagaaccccttatcagtgggataatagcgagaatgctggcttcacaaccggaacgccttggcttaaagtcaacccgcgctatacagaaatcaacaacgaagaagcgctgaaaaacccagattccattttctactactaccaaaatcttattaagttacgaaaaacgactgaaatcatcacaacaggtaattatcgcctgttattacctaaagatgaagcgattttcgcatatgaacgctacacagaaaatgaaaaattagttgttttatgtaatttcacagaagaagaacaagttatttctgatgaaaccattttgaacgaaatccaaaaaggttccgttcttgtaaacaatgttcctaatattatagaaggaactttacgaccttacgaagcaatcgtttatcaaatcaagtaa

SEQ ID NO: 50 - protein, 553 aa, Listeria monocytogenes EGD-e
MKEKDWWKKSVVYQIYPKSFNDSNGDGVGDIQGIIEKLDYLKELGVDVIWLSPVYDSPQDDNGYDIRDYQKIYEEYGDMATFDQLLQGLHDRDMKLVMDLVVNHTSDEHKWFEESRKSKDNPYRDYYFWREENEINNWGSIFSGPAWELDEKTGEYYLHLFSKKQPDLNWENPKLRQDVYNMMKFWLDKGIDGFRMDVINFISKNTDFPDGPVPDGQIYGDAGNDFCNGPRIHEFLQEMNQEVTSKYDVMTVGEMPGASTTDAQIYTNPANNEVDMIFTFEHMNLDSDSDNKWDLKPIYLPDLKENMSEWQVALQENGWNSLYWNNHDQPRIVSRFGNDNRFRVRSAKMLATCLHMMKGTPYIYQGEEIGMTNVHFETLDDYRDIETLNMYKERKEQGHSHESIMQSIYTKGRDNARTPYQWDNSENAGFTTGTPWLKVNPRYTEINNEEALKNPDSIFYYYQNLIKLRKTTEIITTGNYRLLLPKDEAIFAYERYTENEKLVVLCNFTEEEQVISDETILNEIQKGSVLVNNVPNIIEGTLRPYEAIVYQIK

SEQ ID NO: 51 - DNA, 1776 bp, Listeria monocytogenes EGD-e
  CDS (1)..(1776): transl_table=11
atggaaaaagcagggatttaccatcaaccggcgagtagctatgcatatagttatgacgctaaaacactacatattcggattagaactaaacgcttggatattagcaaggttactctaattgctgccgacccttacttatggaaagatggaaaatggcaaagtgaatcgtatacaatgcgcaaaatcgcagaaacagaagagcatgattattggttttttgcaattacaccagaacatagacgccttcaatatggatttttattaaccgatactgaaggagaaacaacattttatggcggacgtggtttttttgagccgaccgaggcgaatttagctacgatggattattactttaaatttccgtttatccatgcagtagatacatttgaggcacctgaatgggttagaaataccatttggtaccaaattttcccagaacgttttgcgaatggtaatccagctatttctccggaaaataccttgccgtgggggagtaaagatccgaatacaacagacttttttggtggagatattgaagggattatcgagcacttagattatttagcagagcttggtatcaatggggtttatttaacgcctgtttttgaagcaccgaccaaccacaaatacgacacaattgattataaaaaaattgatccgcactttggagacaaggaaacttttagaaaattagttaaagaagcgcataaacgtggtattcgcattatgctagatgcggtgttcaatcatattggggatacttctccagagtggcaagatgttgttgaaaaagaagaaaaatcagcgtatcgcgactggttccatattcatagtttcccagttcgtcaaaatgaaaatggcaatatcgaaggagaaccaacactttcttatgatacatttgctttcacaacgcatatgccaaaattaaatacggctaacccagaagttcagaagtatttactggatattgcgacttactggattcgtgagtttgatattgacggttggcgtttagacgttgctaatgaagtggatcacgctttttggaaagagtttaagaaggcggctcaagcggaaaaagaagacatttatattcttggtgaaatttggcatgattcatggatttggctacttggagatgaattccacgccgtaatgaattatccatttacacaaacgattattgagaactttattgaagaaaaaattaccccagagcaaatggtttctggcattaatgaacaatatatgcgctacccaaatcaagtgaatgaagtgatgtttaacatgcttgatagccatgatacagcgcgtattttaacacgtgctaataacgatgaggataaagtgaaacaagcgcttgccttcatgttcgcgcacactggttcgccgtgtatttattatggaacagaaatcggcatggacggcggaaatgacccaggttgccgtaagtgtatggaatgggacgaagcaaaacaaaatcaagatatgctagcatttacaaaacaactaatcgctctaagaaaagataatcaagctattatcacatccggtgagttaacttggttagaggcaagcagcgaaacgggcattactgcattttctaaagaattaaatggtgaaaaactacatttccttttcaatcaaacgaaaaaagatcaggatttcacaatttcatttgctaataccgcgatagatatttggaataaccaagctgtatctgataatctaactatcccggcaaaaggatttcttgttattaaagaaaacagctaa

SEQ ID NO: 52 - protein, 591 aa, Listeria monocytogenes EGD-e
MEKAGIYHQPASSYAYSYDAKTLHIRIRTKRLDISKVTLIAADPYLWKDGKWQSESYTMRKIAETEEHDYWFFAITPEHRRLQYGFLLTDTEGETTFYGGRGFFEPTEANLATMDYYFKFPFIHAVDTFEAPEWVRNTIWYQIFPERFANGNPAISPENTLPWGSKDPNTTDFFGGDIEGIIEHLDYLAELGINGVYLTPVFEAPTNHKYDTIDYKKIDPHFGDKETFRKLVKEAHKRGIRIMLDAVFNHIGDTSPEWQDVVEKEEKSAYRDWFHIHSFPVRQNENGNIEGEPTLSYDTFAFTTHMPKLNTANPEVQKYLLDIATYWIREFDIDGWRLDVANEVDHAFWKEFKKAAQAEKEDIYILGEIWHDSWIWLLGDEFHAVMNYPFTQTIIENFIEEKITPEQMVSGINEQYMRYPNQVNEVMFNMLDSHDTARILTRANNDEDKVKQALAFMFAHTGSPCIYYGTEIGMDGGNDPGCRKCMEWDEAKQNQDMLAFTKQLIALRKDNQAIITSGELTWLEASSETGITAFSKELNGEKLHFLFNQTKKDQDFTISFANTAIDIWNNQAVSDNLTIPAKGFLVIKENS

SEQ ID NO: 53 - DNA, 1467 bp, Nostoc sp. PCC 7120
  CDS (1)..(1467): transl_table=11
atgcaaattcaaacaccaaactgggtgaaaaacgctgtattctaccaaatcttccccgatcgttttgctagaagtaaacagccccacaagcgcctgttgcgtgatgcgcgttgggaagactgggatgcgatgcctacgctacaaggatacaaaggcggtgatttatggggcatcatggagcagttagactacattcaagacttaggcattgatgccatttactttacacccatctttcaatctgccagcaatcaccgctatcatacccacgactattatcaagtagacccgatgttgggtgggaatgccgcttttaaggaattactagacgcatcccacgaacgcaatattaaagttgtcctcgatggcgtatttaatcattccagtcgaggatttttctttttccacgacgttttggaaaatggccctcattccccttgggtaaattggttcaagattgaaggctggcctctggcaccatatacaggtgagttgccggcaaattatgtaggttgggctgataatcgcgccttgccagtatttaatcatgacaacccagaagtgcgggaatatattatggaaattgccgaatattggattaaattcggcatcgacggctggcggttggatgtaccatttgaaattaaaactcctggcttttggcaagaattccgcgatcgcgttaaagccattaaccccgaagcttatattgtgggggaagtgtggggagattccagcgagtggctagatgggacgcaattcgacggtgtgatgaattacttatttgccgggccgaccattgcctttgccgcaggcgatcgcgtagtcttagaacaagtccaaagccgcgattatcaaccatatccgcccctattcgctgccgaatacgccaccaaaattcaggaagtactgcaactttacccttgggacattcaacttacccaactcaacttattagcgagtcacgatacagcccgactcctgaccattgctggcggtgatcaagccagtatacaattagctaccctattactacttacctttcctggcgcgccaagtatctactacggcgatgaagtgggtttaccaggaggtatcgaccccgattctcggcggggctttcctttagaagctaactgggatagagaaatttatcagacccaccgtcaattaatagccttacgccgtacttacccagccttacgcacaggtgactatcaagttatttgggcgcaaggtgcattgtatatttttgcccgcaccttaggcaaagaagaattaattattgccgtaaatgtaggtacagcaacagcccaggctaatgtagatgttgctagtttgcagactcagccaaataaaatcctgtacggtcaagcagaatttcactggcacaatacagaagaaacaaaacaactgttcttaagtctccccccacgtagtggctgcattctgggtttaggggattag

SEQ ID NO: 54 - protein, 488 aa, Nostoc sp. PCC 7120
MQIQTPNWVKNAVFYQIFPDRFARSKQPHKRLLRDARWEDWDAMPTLQGYKGGDLWGIMEQLDYIQDLGIDAIYFTPIFQSASNHRYHTHDYYQVDPMLGGNAAFKELLDASHERNIKVVLDGVFNHSSRGFFFFHDVLENGPHSPWVNWFKIEGWPLAPYTGELPANYVGWADNRALPVFNHDNPEVREYIMEIAEYWIKFGIDGWRLDVPFEIKTPGFWQEFRDRVKAINPEAYIVGEVWGDSSEWLDGTQFDGVMNYLFAGPTIAFAAGDRVVLEQVQSRDYQPYPPLFAAEYATKIQEVLQLYPWDIQLTQLNLLASHDTARLLTIAGGDQASIQLATLLLLTFPGAPSIYYGDEVGLPGGIDPDSRRGFPLEANWDREIYQTHRQLIALRRTYPALRTGDYQVIWAQGALYIFARTLGKEELIIAVNVGTATAQANVDVASLQTQPNKILYGQAEFHWHNTEETKQLFLSLPPRSGCILGLGD

SEQ ID NO: 55 - DNA, 3483 bp, Ralstonia solanacearum GMI1000
  CDS (1)..(3483): transl_table=11
atgacgcgcaacccgaccgtgctgctggtggacgacgcgctctggtacaaggacgcggtcatctatcagctgcacgtcaaatcgttctgcgactcggacaacgacggcgtaggggacttcccgggcctgatctccaagctcgactacatcgccgagctgggcgtggatgcgatctggctgctgccgttctacccctcgccgcgccgcgacgacggctacgacatcgccgaataccgcggcgtgcaccccgactacggcaccatggccgacgcgcgccgcttcattgccgaggcgcacgcgcgcggcctgcgcgtcattaccgagctggtcatcaaccacacctcggaccagcacccgtggttccagcgcgcgcggcgcgccaaggcgggctccgcgctgcgcgacttctacgtgtggtcggaccacgacaagaaatacgccggcacgcgcatcatcttcatcgacaccgagccctccaactggacctgggacccggtggccgacgcctactactggcaccgcttctattcgcaccagcccgacctgaacttcgacaacccgcgcgtgctcaaggccgtgctgggcgtgatgaagttctggctcaacctgggcgtggacggcctgcggctcgatgccgtgccctacctggtggagcgcgagggcaccgccaacgagaacctgcccgagacgcacgccgtgctgcgcaagatccgcgcggcgatggacgcggaattcaagaaccgcctgctgctggccgaagccaaccagtggcccgaagacacacaggaatacttcggcaacggcgacgagtgccacatggccttccactttccgctgatgccgcgcatgtacatggcgatcgcgcgggaggaccgcttcccgatcaccgacatcatgcggcagacgcccgaggtgccgcccacctgccagtgggccatcttcctgcgcaaccacgacgagctgacgctggagatggtgaccgacgcggagcgcgactacctgtgggaggtctacgccagcgaccgccgcgcgcggctcaatctcggcatccgccggcgcctggcgccgctgctggagcgcgaccgccgccgcgtggagctgatgaacagcctgctgttctcgatgcccggcacgccggtgatgtattacggcgacgagatcggcatgggcgacaacatccacctgggcgaccgcgacggcgtgcgcacgccgatgcagtggtcgcccgaccgcaacggcggcttctcgcgcgccgatccggagcagctggtgctgccggccatcatgggctcgctgtacggctatgaatcggtcaacgtggaggcgcagacgcgcgacgcgcattcgctgctgaactggacgcgccggctgctggccacgcgcaagcgccaccgcgtgttcgggcgcggcagcatccagttcctgcagccggccaaccgcaaggtgctggcctatgcgcgcgcgctggaaggcgaggcccccatcctgtgcgtggcgaatctgtcccgggcctcgcaggcggtggagctggacctggccgcctatgcgcagcgcgtgccggtggagttgatcggcgggacggccttcccgccgatcggccagttgccctatctgctgacgctgccgccctatgcgttctactggctggagctgcgcgagaacgagcccggcccgtcgtgggcgcagccggccgcggagcagttgcccgagttcaccacgctggtgctgcgcgcggggctcgatgcgctggccgacacacgccagcgcgaggcgcaccgccagctggtcgagcgcgagatcctgccgacctacctgcccaagcgccgctggttcgcggccaaggacagcgtgctgcgcggcgcgcacttcgcctggggcaccgagctgccggtggatgcggcctccaccaaccggccgctggcgggggcgacccggcccgaggtgttcatcaacgagatcgccgtcacgctgggcgacgcggacggcaccgagcgcaccgagcgctacctgctgccgctgtcgatcgcgtgggagagcgccacgctgcccgcgctgccgatccagctggcgctggcgcgcgtgcggcgcggccgccatgtcggctacctgaccgatgccttcaccaccgagaccttcgcccgtgtgctgctggccaacctggtgcgcggcgtcacgctggaggccagcgacggccgcgtgcatttcgagcccgagccgcacctggccgaactggccgagccgccggtggccgccgaaaccgcggcggtgcgcccggcgccgctgccgctggcgcccgacgcgccggtgcagtggctggcggcggagcagtccaacagctcgctggtgatcggcgaatcggtcatcgtcaagctgatccgccgggtggcggcgggtgtgcatccggaagtggagatgacgcgccacctcacgcgcatcggctatgccaacacggccgcgctgatcggcgagatcgcgcacgagggcgcggacggcgagcgcagcacgctggccgtgctccagagcttcgtgcccaaccagggcgatgcgtggacatgggcactcgactacctgcgccgcaccattgatgagctggcggtgctgacggaggccgtctcggccggcgacggcgacgcggcgcccaccgccgtctcggaagcgcgcaccgataccgacgaagcgctggcgggctacctggccttcatcggcgcgatcggcacgcggctaggcgagctgcacgtcgcgctggccgggccgtcggacgatccggccttcggcacccgcgccgccgacgccgacgacgcagccttctggaccgcgcgcgtggacgaggagctggcccgcgcgctcgaccacctcgcggcatggcaggcggccaacggaccgcgcgccgaggtcggctggctgctgtcgcagcgcgatgccctgctggaagccgcccgcgaacgcgcacagggcggcctgggcgcgatgctggcgcgcgtccacggcgacttccacctcggccaggtgctggtggcgcagggcgatgcctacctgatcgacttcgagggcgagccgtcgcggccggtggacgagcgccggcgcaagaccagcccgctgcgcgacgtggccgggctggtgcgctcgctcgactacgtggtgggcgccatgcggcagggccccgagcatgtggccggaccggcgcaggagcggcgcgaccagctgctcgaacgcttccgcaatgcgtccaccgagcgcttcctggaggcctacgcggccgccatcctggcctccggttccgatgacggcgcctgcatgctcgatctggacctgctcgacctgttcctgttggagaaggcggcctacgaggtcaactacgaagcggccaaccggccgacgtggctgccgatcccgctggcgggcctggcgcgggtggcgcgccggctgctgccagcggacgtggcaccgcccgtggcgcgggatccgctcggaggcccgccgtga

SEQ ID NO: 56 - protein, 1160 aa, Ralstonia solanacearum GMI1000
MTRNPTVLLVDDALWYKDAVIYQLHVKSFCDSDNDGVGDFPGLISKLDYIAELGVDAIWLLPFYPSPRRDDGYDIAEYRGVHPDYGTMADARRFIAEAHARGLRVITELVINHTSDQHPWFQRARRAKAGSALRDFYVWSDHDKKYAGTRIIFIDTEPSNWTWDPVADAYYWHRFYSHQPDLNFDNPRVLKAVLGVMKFWLNLGVDGLRLDAVPYLVEREGTANENLPETHAVLRKIRAAMDAEFKNRLLLAEANQWPEDTQEYFGNGDECHMAFHFPLMPRMYMAIAREDRFPITDIMRQTPEVPPTCQWAIFLRNHDELTLEMVTDAERDYLWEVYASDRRARLNLGIRRRLAPLLERDRRRVELMNSLLFSMPGTPVMYYGDEIGMGDNIHLGDRDGVRTPMQWSPDRNGGFSRADPEQLVLPAIMGSLYGYESVNVEAQTRDAHSLLNWTRRLLATRKRHRVFGRGSIQFLQPANRKVLAYARALEGEAPILCVANLSRASQAVELDLAAYAQRVPVELIGGTAFPPIGQLPYLLTLPPYAFYWLELRENEPGPSWAQPAAEQLPEFTTLVLRAGLDALADTRQREAHRQLVEREILPTYLPKRRWFAAKDSVLRGAHFAWGTELPVDAASTNRPLAGATRPEVFINEIAVTLGDADGTERTERYLLPLSIAWESATLPALPIQLALARVRRGRHVGYLTDAFTTETFARVLLANLVRGVTLEASDGRVHFEPEPHLAELAEPPVAAETAAVRPAPLPLAPDAPVQWLAAEQSNSSLVIGESVIVKLIRRVAAGVHPEVEMTRHLTRIGYANTAALIGEIAHEGADGERSTLAVLQSFVPNQGDAWTWALDYLRRTIDELAVLTEAVSAGDGDAAPTAVSEARTDTDEALAGYLAFIGAIGTRLGELHVALAGPSDDPAFGTRAADADDAAFWTARVDEELARALDHLAAWQAANGPRAEVGWLLSQRDALLEAARERAQGGLGAMLARVHGDFHLGQVLVAQGDAYLIDFEGEPSRPVDERRRKTSPLRDVAGLVRSLDYVVGAMRQGPEHVAGPAQERRDQLLERFRNASTERFLEAYAAAILASGSDDGACMLDLDLLDLFLLEKAAYEVNYEAANRPTWLPIPLAGLARVARRLLPADVAPPVARDPLGGPP

SEQ ID NO: 57 - DNA, 1821 bp, Clostridium perfringens str. 13
  CDS (1)..(1821): transl_table=11
atgggaaaagcttatatttatcatgattctcaagataccttttatagggaaccttttggagctgtttctataggttctaaggtaagtttaagattagaatgcgaagagtgtggagaagtttttatagaggtaataaagtttgatggaagtagatattcaatacctatgacaattgaagagcgaagaaatgaatgcataatttataaagggattatagacactacaaactccttaggagtaataaattattactttaaatacattaaggacggatttactaagtattatggaaataatgatgaatgtttaggaggagagggaaagatatattatgattttcctaattattatcaaataacagtttatgaagataataaaattcctagttggtataaggaaggtattatttatcaaatatttgtggatagattttttaatgggaataagaatagtgtgatattaaataaaaagaaaaatagctttatatatggtaattggtatgatgagccaatgtatataagagataataatggaagtattaaacggtggggtttttatggaggtaatttaaggggagtaattgaaaaattagattatataaaatctttaggtgtaaatattatatacatgaatccaatctttgatgctgtgagttgtcataaatatgatactggagattatgaaaatattgataagatgtatggaactaacagtgattttaaggaattgtgccaaaaagctgaggaaaaaggtataaggataatattagatggagtttttagtcatacaggatcagatagtaggtactttaataaatacggaaactatggagagcttggagcctatgaatctaaatactctaaatattataagtggtataggttttatgactatcctaatagttatgaatgttggtgggggtttgaaaatcagcctaatgtagaggaattagaaaagacatattcagattatatagttaatagtgaaaattcaataatagcaaagtggcttagattaggagcaagtggttggaggctagatgtagcagatgaacttccggatgaattcatacaaatgattaaggaaaggatgaaaaatgagaaagaagatagtgtgcttataggagaggtttgggaagatgcttcaaataaggttagctattcaaaaagaagaaaatatttattaggagatgaattagattctgtaacaaattacccttatagagatataatttctaattttttaaatgaagaaataagttcaaaggatttttataaagtaataatgagcataaaagaaaattatccaagagaaaacttttatgcaaatatgaatattctagggaaccatgacacagaaagaatacttacagtattaaaagagaatttaaataagttaaaattagctctatgtcttcaaatgactttacctggagttcccttaatttattatggcgatgaggcaggacttttaggaaataaggatcctgaaaatagaaagacctatccttggggacgagaaaataaggaaatattaagttattatagctttttcggaaactttagaaagaatgaagaggttttaagaaagggagatttttatatttttaaggatacacctgaggatgttattgcttttaagagagtttataaagataaagaaatgataattatagtaaacaggagtaattctagaaaaaccataaccttagatagcgagaaaggaagatataaagataaattttctaaggaagaattttatggtgatggtagcattactttagaagtagaaagagaaaattataaaattttaactaattag

SEQ ID NO: 58 - protein, 606 aa, Clostridium perfringens str. 13
MGKAYIYHDSQDTFYREPFGAVSIGSKVSLRLECEECGEVFIEVIKFDGSRYSIPMTIEERRNECIIYKGIIDTTNSLGVINYYFKYIKDGFTKYYGNNDECLGGEGKIYYDFPNYYQITVYEDNKIPSWYKEGIIYQIFVDRFFNGNKNSVILNKKKNSFIYGNWYDEPMYIRDNNGSIKRWGFYGGNLRGVIEKLDYIKSLGVNIIYMNPIFDAVSCHKYDTGDYENIDKMYGTNSDFKELCQKAEEKGIRIILDGVFSHTGSDSRYFNKYGNYGELGAYESKYSKYYKWYRFYDYPNSYECWWGFENQPNVEELEKTYSDYIVNSENSIIAKWLRLGASGWRLDVADELPDEFIQMIKERMKNEKEDSVLIGEVWEDASNKVSYSKRRKYLLGDELDSVTNYPYRDIISNFLNEEISSKDFYKVIMSIKENYPRENFYANMNILGNHDTERILTVLKENLNKLKLALCLQMTLPGVPLIYYGDEAGLLGNKDPENRKTYPWGRENKEILSYYSFFGNFRKNEEVLRKGDFYIFKDTPEDVIAFKRVYKDKEMIIIVNRSNSRKTITLDSEKGRYKDKFSKEEFYGDGSITLEVERENYKILTN

SEQ ID NO: 59 - DNA, 1665 bp, Clostridium perfringens str. 13
  CDS (1)..(1665): transl_table=11
atgaataaaaagtggtggaaagaattaattgcttaccagatttaccctaagagctttatggattctaatggtgatggtataggtgatattcaaggtataatatctaaattagattatttaaaagatttaggtattgatttaatctggttatgtccaatgtataaatcaccgaatcatgataatggttatgacattagtgattataaagatatcttagatgaatttggaactatggatgattttaatgaattgcttaatgaggttcataatagagggatgaagcttattatagatttagtaataaatcacactagtcatgaacatccatggtttatagaatcaagatcttctagggataatcctaaaagagattggtatatttggagagaaggtaaaggggatgaggaacctaataactgggaaagtatatttaaaggttcagcttgggaattctgtgagaatagtgaagagtattacctacatttatttgctaaagagcaaccagatttaaactgggagaataaagaggtaagaaatgaactatataaaatgataaactggtggcttgataagggtattgatgggtttagagttgatgccataagtcacataaaaaaagaagagggtcttaaggatatggataatccagagggacttaaatatgtttcatcctttgaaaagcatatgaatgtagagggaataaattctcatcttaaagaactaaaagaagaaactttttcaaagtataatatagttacagttggagaagcaaatggagttagtgccaatgaagctgatcactgggtagctgaagatgagggaacatttaatatgatattccaatttgagcatcttaatctttggaattatgaagagggacaaggatttgatgtgaaggcatacaaagatgttttaacaaattggcaaaattctttagaaggtaaaggatggaatgcacttttcattgaaaatcatgatatacctagagttgtttcaacttggggaaatgacaaggaatatttaactgaatgtgcaaaagcttttggagcaatttatttcttacaaaagggaacccctttcatataccaagggcaagaacttggtatgacaaatgttaaatatcatagcatatctgagtataatgatgttaaaactataaatacttacaatgaaagaattgaaagtggtgtttcagaggaaatagcattaaaagaagcttgggtaacttcaagagataattcaagaacacctatgcaatggaattcaagtgagaatgcagggtttacttgtggaaaaccttggataggagttaatgaaaattataaaacaataaatgtagaagttgaagaaagggatgaaaattcagttttaaacttctataaaaagcttataaaacttaaaaagtctaatgaagctttaatctatggtgtatatgatttaatccttgaagaggatgaaaatatctttgcttatacaagaactttaaataatgaaaagttcttgataatggctaatttaactggagaaaatgccaagtacatgtatgagaaagaaaaacttaattctaaggatttaattcttaacaattatgaggtttgtgaacataaaaacttaacagagtttacattaaaaccttatgaatgcagagtatataagctttcttaa

SEQ ID NO: 60 - protein, 554 aa, Clostridium perfringens str. 13
MNKKWWKELIAYQIYPKSFMDSNGDGIGDIQGIISKLDYLKDLGIDLIWLCPMYKSPNHDNGYDISDYKDILDEFGTMDDFNELLNEVHNRGMKLIIDLVINHTSHEHPWFIESRSSRDNPKRDWYIWREGKGDEEPNNWESIFKGSAWEFCENSEEYYLHLFAKEQPDLNWENKEVRNELYKMINWWLDKGIDGFRVDAISHIKKEEGLKDMDNPEGLKYVSSFEKHMNVEGINSHLKELKEETFSKYNIVTVGEANGVSANEADHWVAEDEGTFNMIFQFEHLNLWNYEEGQGFDVKAYKDVLTNWQNSLEGKGWNALFIENHDIPRVVSTWGNDKEYLTECAKAFGAIYFLQKGTPFIYQGQELGMTNVKYHSISEYNDVKTINTYNERIESGVSEEIALKEAWVTSRDNSRTPMQWNSSENAGFTCGKPWIGVNENYKTINVEVEERDENSVLNFYKKLIKLKKSNEALIYGVYDLILEEDENIFAYTRTLNNEKFLIMANLTGENAKYMYEKEKLNSKDLILNNYEVCEHKNLTEFTLKPYECRVYKLS

SEQ ID NO: 61 - DNA, 1833 bp, Clostridium perfringens str. 13
  CDS (1)..(1833): transl_table=11
atgggtaaaattacaagagaggcaatacatcatatagctcaaagcaattattcttatggatatgataatgaaactttgcatttaagagttaagactaaaaaaggtgaagttaataaagtggaaataagaattggagatccttacatatgggatgaaggtggttgtgatggaggaaatatgaatgccactggaggacgatggacaggtggaaaaagttatcctatgagaaaggaatgcgaaacaaaatactttgatcactggatagtagggtataaaccattaaccaaacgttcaagatatggatttatattatatggagatgaggaaactcttttatgcacagaaaaaagaatagaggagttagatggaaagtatgatgaagaaaaattaagtgctataggaaacttttattgttttccatatttaaatgccatagatgttgctaaaacaccacaatgggtaaaggatactgtttggtatcaaatattcccagatagattttgcaatggagataaatcaatagatccagaaaatgttgagccatgggggacagagcctactagggataattttatgggaggagatttacagggagttttagataaattagattacttatgcgatcttggaattaatggactatatttttgtccagtatttgaagctactgagaatcataggtatgaaactatagattattttaaagtagatccagcacttggtgggaatgaagtctttaaaaaacttgtaagtgaagctcacaaaagaggcatgaaaataatgttagatgcagtatttaatcatataggttatttttcaccaaaatggcaagatgtattaaagaataatgaaaaatcaagatataaggattggttttgtataaagaagttcccagtgcttgaaaatggcttagaaaatgttgatggaaataatttgaattatgaaacctttggaagaatagccacaatgcctaaactaaatactgaaaacccagaggttgtagaatatttattaaaagtcgctaagttctgggttgaagaaatggatatagatggttggagacttgatgtatgtaatgaagtagaccatgtattttggagaaaatttagggaagtagtaaagggaactaataaagaagtttatatattaggagaagtttggcatgatggacttccatggcttatgggagatcagtttgattcagttatgaattaccctgttacagatgcagtaaaagaatatttttgtttaaatcaatctaatccagaagattttaaatatatgatagaagctaataaggttagctatttaagacaaataggagaaacaatatttaacttgttagatagtcatgatactccaagaatattaactgtagctggaggaaataaggataagatgaaactagcttatctgtttatgtttactcaagctggctctccatgtatatattatggagatgaagttggtatggaaggaaatcaaggaatgggtatggaattccatagaagatgtatgatttgggatgaaaataaacaagacaaagatatgcttaagtttatgaaacaaataataaaaataagaaaagaaaataaggaattaaatttattagataataattggataagagctaataaggatgaaaatatacttatttattcaaaggaaaatatatttataattatgaacaattcagagaatgaagaaaagatatatttacctaaggagcttaaaaataataagattaatgatttatttgaagaaaaaattgaactcttaaaagaagatatagacttaaagccctttgcatttaaagtttataaaaagctttaa

SEQ ID NO: 62 - protein, 610 aa, Clostridium perfringens str. 13
MGKITREAIHHIAQSNYSYGYDNETLHLRVKTKKGEVNKVEIRIGDPYIWDEGGCDGGNMNATGGRWTGGKSYPMRKECETKYFDHWIVGYKPLTKRSRYGFILYGDEETLLCTEKRIEELDGKYDEEKLSAIGNFYCFPYLNAIDVAKTPQWVKDTVWYQIFPDRFCNGDKSIDPENVEPWGTEPTRDNFMGGDLQGVLDKLDYLCDLGINGLYFCPVFEATENHRYETIDYFKVDPALGGNEVFKKLVSEAHKRGMKIMLDAVFNHIGYFSPKWQDVLKNNEKSRYKDWFCIKKFPVLENGLENVDGNNLNYETFGRIATMPKLNTENPEVVEYLLKVAKFWVEEMDIDGWRLDVCNEVDHVFWRKFREVVKGTNKEVYILGEVWHDGLPWLMGDQFDSVMNYPVTDAVKEYFCLNQSNPEDFKYMIEANKVSYLRQIGETIFNLLDSHDTPRILTVAGGNKDKMKLAYLFMFTQAGSPCIYYGDEVGMEGNQGMGMEFHRRCMIWDENKQDKDMLKFMKQIIKIRKENKELNLLDNNWIRANKDENILIYSKENIFIIMNNSENEEKIYLPKELKNNKINDLFEEKIELLKEDIDLKPFAFKVYKKL

SEQ ID NO: 63 - DNA, 1938 bp, Pyrococcus furiosus DSM 3638
  CDS (1)..(1938): transl_table=11
atgtataagctcgtcagtttcagagatagcgagatctttggaagagttgcagaggtggaattttccctaataagagaaggaagctatgcatacctccttggtgactttaatgcatttaatgagggaagttttagaatggagcaagaaggaaagaattggaagattaaaatcgcccttccagaaggggtatggcactatgctttttcaatagatgggaaattcgtcttagatccagataatcctgaaagaagagtatatactagaaagggttacaaattccacagagaagttaatgttgcaagaattgtcaaaagtgacgatttggttttccatactccttctctcctgtatctgtatgaaatttttgggagggttcacgttcttttaaggacacaaaagggggtaataaaaggggcaactttcctgggggagaagcatgttcctatgaggaagaaggcttctgatgagctatttgattactttgaggttatcgtagaaggaggagataagaggttaaattattcatttgaagtattaacaatggaaggagcgaaatttgagtatggtcaatttaaggcgagacccttcagtatcgaatttccaacctgggttattgacagggtattctatcaaataatgccagacaaatttgctaggtctaggaaaattcaaggaattgcctatccaaaagataaatattggggaggagatctaatcggaattaaggaaaagatagaccaccttgtgaaccttggaataaatgcaatatatttaactccaatcttcagttccctcacatatcatggatatgacatagttgattatttccacgttgcaaggagacttggaggagacagggcctttgtggatttgttatctgagcttaaaaggtttgatataaaggttatccttgatggggtatttcaccatacgagctttttccacccatatttccaagatgttgtaaggaagggggaaaatagcagctttaaaaacttttacaggattattaaatttccagtagtctcaaaagaatttcttcaaatcctccattcaaaatcttcctgggaagaaaagtacaaaaagataaaatcccttggctggaattacgagagctttttctcagtttggataatgccgagattaaaccacgataatccaaaggttagagagtttatcaagaatgtgattcttttctggacaaataagggggtcgatggatttagaatggatgttgctcatggggttcctccagaagtgtggaaagaagttagagaagcattgccaaaagaaaagtacttaattggagaagttatggatgatgcaaggttatggctgtttgataaattccatggagtcatgaactatcggctctatgatgcaatcttaaggttttttggatatgaggagattacagccgaggaattcttaaatgaactagagctcttaagctcgtattatggcccagcagagtatctaatgtataattttttagacaatcatgatgttgagagatttttggatatagttggggataagaggaagtacgtgtgtgctttggtcttcttgatgacttacaaaggtattccatctctcttctacggagatgaaatagggttgagagggattaatctccaaggaatggaatcttccagagcaccaatgttgtggaatgaagaagagtgggatcaaaggattttggagataacaaagacactagtaaagattaggaaaaacaataaagccctcctttttggtaattttgtcccggtgaagtttaaaagaaaattcatggtatacaagagggaacacatgggagagagaactatcgttgccattaactactcaaattcacgcgttaaagaactaggaataacaattcctgaatattcgggcgtgataattaatgaagataaagtgaaattgataaagtactaa

SEQ ID NO: 64 - protein, 645 aa, Pyrococcus furiosus DSM 3638
MYKLVSFRDSEIFGRVAEVEFSLIREGSYAYLLGDFNAFNEGSFRMEQEGKNWKIKIALPEGVWHYAFSIDGKFVLDPDNPERRVYTRKGYKFHREVNVARIVKSDDLVFHTPSLLYLYEIFGRVHVLLRTQKGVIKGATFLGEKHVPMRKKASDELFDYFEVIVEGGDKRLNYSFEVLTMEGAKFEYGQFKARPFSIEFPTWVIDRVFYQIMPDKFARSRKIQGIAYPKDKYWGGDLIGIKEKIDHLVNLGINAIYLTPIFSSLTYHGYDIVDYFHVARRLGGDRAFVDLLSELKRFDIKVILDGVFHHTSFFHPYFQDVVRKGENSSFKNFYRIIKFPVVSKEFLQILHSKSSWEEKYKKIKSLGWNYESFFSVWIMPRLNHDNPKVREFIKNVILFWTNKGVDGFRMDVAHGVPPEVWKEVREALPKEKYLIGEVMDDARLWLFDKFHGVMNYRLYDAILRFFGYEEITAEEFLNELELLSSYYGPAEYLMYNFLDNHDVERFLDIVGDKRKYVCALVFLMTYKGIPSLFYGDEIGLRGINLQGMESSRAPMLWNEEEWDQRILEITKTLVKIRKNNKALLFGNFVPVKFKRKFMVYKREHMGERTIVAINYSNSRVKELGITIPEYSGVIINEDKVKLIKY

SEQ ID NO: 65 - DNA, 1614 bp, Streptococcus pyogenes MGAS8232
  CDS (1)..(1614): transl_table=11
atgaagaaacactggtggcataaagctacgatttatcagatttacccgagatcctttaaagacaccaatggcaatggtattggtgatttaaaaggcattaccagtcaactggactacttgcaaaaacttggcattacagccatttggttatctcctgtttaccaaagtccaatggatgacaatggttatgacatctctgactatgaagcgattgctgatgtttttggagacatggcagatatggatgagctcttggcagcagctaatgagcgaggcattaagattatcatggacttggtggtcaaccatacgtctgatgagcacgcttggtttgttgaagctagggaaaactctaatagtcctgagcgtgatttttatatttggcgagatgaacctaacgatttgacttctatttttagtggctcagcttgggaatatgataatgcatcagggcaatattatttgcacctttttagcaaacgtcagccagatctcaactgggagaatgaagctttgcgtcataaaatttacgatatgatgaatttctggattgccaaaggcataggtggttttcggatggacgtgattgacctgattgggaaggttcctgacttggaaatcacaggtaacgggccgcggttacacgattacctcaaagaaatgaatcaagcaacctttggcaatcatgacgtgatgactgtcggtgagacttggggagcaacgcctgaaattgctcgccagtattctcgccctgaaaataaagagttatccatggtcttccaatttgagcatgtgggtcttcaacataaacctgacgctcccaagtgggattatgcggaagaactggatgttcctgctctgaaagctatttttagcaagtggcagacagaattaaagttgggagaaggctggaattcacttttttggaataaccatgacttgccacgggtcttatccatttggggcaatgacagcacttaccgagaaaaatcagccaaggctttagctattttactgcatttgatgcgaggaaccccttacatttaccaaggagaagagattggcatgaccaattatccttttaaagacttaaccgaggttaatgatattgagtcccttaactatgctaaagaagctatgggaaatggagtgtcagctgcgcgtgtgatggatagcatccgtaaggtaggacgagacaatgctagaacgccgatgcagtggtctaaggatacacatgctggcttttctaaagcccaagagacttggttgccggtcaaccccaactaccaagacatcaatgtggccgatgcccttgctgatccagattctattttttacacttaccaaaaattgattgccttgcgtaaggagcaagactggctagttgaagcggattatcacctcttgccaacagctgataaagtgtttgcttatcagcgtcagcttggagaagagacatatgtgattgttgtcaatgtgtctgatcaagagcaagtctttgccaaagatttagcgggtgcagaagtggtcatcaccaatacagatgtggacaaagtgttagagaccaagcacttacaaccttgggatgccttttgtctcaaactgaaggcctag

SEQ ID NO: 66 - protein, 537 aa, Streptococcus pyogenes MGAS8232
MKKHWWHKATIYQIYPRSFKDTNGNGIGDLKGITSQLDYLQKLGITAIWLSPVYQSPMDDNGYDISDYEAIADVFGDMADMDELLAAANERGIKIIMDLVVNHTSDEHAWFVEARENSNSPERDFYIWRDEPNDLTSIFSGSAWEYDNASGQYYLHLFSKRQPDLNWENEALRHKIYDMMNFWIAKGIGGFRMDVIDLIGKVPDLEITGNGPRLHDYLKEMNQATFGNHDVMTVGETWGATPEIARQYSRPENKELSMVFQFEHVGLQHKPDAPKWDYAEELDVPALKAIFSKWQTELKLGEGWNSLFWNNHDLPRVLSIWGNDSTYREKSAKALAILLHLMRGTPYIYQGEEIGMTNYPFKDLTEVNDIESLNYAKEAMGNGVSAARVMDSIRKVGRDNARTPMQWSKDTHAGFSKAQETWLPVNPNYQDINVADALADPDSIFYTYQKLIALRKEQDWLVEADYHLLPTADKVFAYQRQLGEETYVIVVNVSDQEQVFAKDLAGAEVVITNTDVDKVLETKHLQPWDAFCLKLKA

SEQ ID NO: 67 - DNA, 1725 bp, Thermoanaerobacter tengcongensis MB4
  CDS (1)..(1725): transl_table=11
atgataaaagaggctatattccacaaaagcgatataccttatgcatatcctgtaaataaagaccaattaaaaatagtcttgagaacggcagttttcgatgtggatagggtatacattctttttaaagacaggtatgactggctgggcaaatttaaaataaagcctatgaccttagttcacactaacgagctttttgactattatgagactactcttgaattaaataagaggtttttgtactttttttatttagtttcagaaacgggagaaaaactttattacacagaagctggttttttcaaaaagaggccagaggatagcttctggggttttttccactatccctatataagggaaaaggatatattttctcctccggattgggcaaacgagtgcatagtgtatcagatatttccagacagattcaacaatggagacagaactaatgaccccgaaaacgtaaagccatggggggaaaagccgactgcagattctttttttggaggggatttacagggaataatcgacaaaatagattatttaaaagagttagggataaatgccatttatttaactccaatatttttgtctccttctactcacaaatacgacaccacggattattacacgatagaccctcattttggtgacacggaaaaagctaaagaattggtgaggaagtgtcatgacaatggcataaaagttatattcgatgcagtgttcaaccactgtggatacgacttttttgcatttcaggatgtggttaaaaatgggccgaagtcaaagtactgggattggttcaatgtgtacgaatggcccattaaaacgcatcccaaacctacttacgagacttttggcgagaatgtgtggagaatgcctaagcttatgactaaaaacccggaagtgcaaaagtacctactggaagtggctgaatactggattaaagaagtagacattgacggctggcgattggacgttgccaacgaaatagaccatcacttctggagaaagtttagagaggttgtaaaaaatgccaaaaaagatgccataatagtaggagaagtgtggcatgatgcttctccgtggttaagaggggaccagtttgactctgtcatgaattatccttttagaaatgcagttgtagacttttttgcgaagaggaaaataagtgctgtaaaattcaacacactgataactgagcagcttatgagacacatggatagcgttaatagagtcatgtttaacctcataggtagtcacgacactgaaaggtttttgactctcgcaaatggcatggtggcgcggatgaaattagctttggttttccagtttacatttgtgggagtgccgtacatctactatggagacgaagctggaatggtgggaggatttgaccctgactgcagaaggtgcatgatatgggaggaggaaaagcagaacaagggactttttgagttttacaaaaagctcatccgcataagaaaggagcatgaagaacttaagtatggcaatttcaccactttgtacgctgttggaagggtgtttgcttttagaagggaatataaaggaaattcaattgtggtgattataaacaacagcagcaaagaggaagtgatatttttagaagaggcgggaggaaaagaggatatattaaaaatgggagaattaaaaaggagtggcaatttgctgtatcttaagcctaacactgcctatattttgaagtag

SEQ ID NO: 68 - protein, 574 aa, Thermoanaerobacter tengcongensis MB4
MIKEAIFHKSDIPYAYPVNKDQLKIVLRTAVFDVDRVYILFKDRYDWLGKFKIKPMTLVHTNELFDYYETTLELNKRFLYFFYLVSETGEKLYYTEAGFFKKRPEDSFWGFFHYPYIREKDIFSPPDWANECIVYQIFPDRFNNGDRTNDPENVKPWGEKPTADSFFGGDLQGIIDKIDYLKELGINAIYLTPIFLSPSTHKYDTTDYYTIDPHFGDTEKAKELVRKCHDNGIKVIFDAVFNHCGYDFFAFQDVVKNGPKSKYWDWFNVYEWPIKTHPKPTYETFGENVWRMPKLMTKNPEVQKYLLEVAEYWIKEVDIDGWRLDVANEIDHHFWRKFREVVKNAKKDAIIVGEVWHDASPWLRGDQFDSVMNYPFRNAVVDFFAKRKISAVKFNTLITEQLMRHMDSVNRVMFNLIGSHDTERFLTLANGMVARMKLALVFQFTFVGVPYIYYGDEAGMVGGFDPDCRRCMIWEEEKQNKGLFEFYKKLIRIRKEHEELKYGNFTTLYAVGRVFAFRREYKGNSIVVIINNSSKEEVIFLEEAGGKEDILKMGELKRSGNLLYLKPNTAYILK

SEQ ID NO: 69 - DNA, 1575 bp, Thermoanaerobacter tengcongensis MB4
  CDS (1)..(1575): transl_table=11
atgagaaaaaatttaaaagcatttgtggcgctttttgcagcaattttgctgttctttagtgggtgcagtagcaagcaagaggcaaaagccccaaagtcagaagtcatatatcaggttatggtggataggttttacaacggagacccttcaaatgacgacccagaagtgagcaaaggaatgtttgaccccacccataccaactggaggatgtactggggaggggatttgaaaggactgacagaaaaaatcccttatataaaggggatgggggtcactgctatctggatttctccagtagtggataatataaataaaccagccgtatataatggcgagattaatgccccctatcacggatactgggcaagagatttcaaaagagtagaagaacactttggtacatgggaggactttgacaattttgtaaaggttgcgcatgagaatggaataaaagtgattttagattttgcgccaaatcacacgagccctgccgatgaagaaaatcctgattttgcagaaaatggcgcattatatgacgatgggaagctattaggtacttacagtaatgattcacttaagctttttcaccacaatggcagcataagcaactggaataatttaaaggaacttcaggataaaaatttgtttgatttggcagatttggaccagagcaaccctattgttgataaatacttaaaagactctattaagttatggtttaatcatgaaattgatggagtaaggctggatgctgcaaagcatatgcctatggagtgggtgaaaagctttgctaacactatttacagtattaaaaaggatgtgcttctttttggtgaatggatgttaagcggtcctactgacccgttgtatgggtataatatacagtttgctaatactaccggcttttctgtcctggattttatgttaaacggtgctataagagatgtatttggcaaggggtacggatttgagaggttaaatgacacgttagaggataccaataaagattacgaaaatccttataagctggttgcttttatagacaaccatgacatgcctagatttctgtccttgaacaatgacaaggataaattacacgaagctattgcttttgtaatgacgactcgagggatacctgtaatatactatggcactgagcagtaccttcataacgacacaaatggcggtaatgacccgtataatagaccaatgatggaaaagttcgatgagagcacaaaggcttatacattgataaaagagctgtcaaggttaaggcagctcactccagccctacagtatggaactactacggcaaggtatatttctgacgatgtgtatatttatgaaaggcagtatggaaaagatgtggtgctggttgcgataaataaaggagagaaaactactgttaaggcagtaaaaacatctttgaggaagggaatttataaagactaccttaaaggtctgttggagggtgttgagttaaaagtcacaaaaggcaatggagaaaacctagtgcaaggtttgactttacctggggacagcgtaagtgtgtggacaaatgtgaaagcgaagtaa

SEQ ID NO: 70 - protein, 524 aa, Thermoanaerobacter tengcongensis MB4
MRKNLKAFVALFAAILLFFSGCSSKQEAKAPKSEVIYQVMVDRFYNGDPSNDDPEVSKGMFDPTHTNWRMYWGGDLKGLTEKIPYIKGMGVTAIWISPVVDNINKPAVYNGEINAPYHGYWARDFKRVEEHFGTWEDFDNFVKVAHENGIKVILDFAPNHTSPADEENPDFAENGALYDDGKLLGTYSNDSLKLFHHNGSISNWNNLKELQDKNLFDLADLDQSNPIVDKYLKDSIKLWFNHEIDGVRLDAAKHMPMEWVKSFANTIYSIKKDVLLFGEWMLSGPTDPLYGYNIQFANTTGFSVLDFMLNGAIRDVFGKGYGFERLNDTLEDTNKDYENPYKLVAFIDNHDMPRFLSLNNDKDKLHEAIAFVMTTRGIPVIYYGTEQYLHNDTNGGNDPYNRPMMEKFDESTKAYTLIKELSRLRQLTPALQYGTTTARYISDDVYIYERQYGKDVVLVAINKGEKTTVKAVKTSLRKGIYKDYLKGLLEGVELKVTKGNGENLVQGLTLPGDSVSVWTNVKAK

SEQ ID NO: 71 - DNA, 1719 bp, Streptomyces coelicolor A3(2)
  CDS (1)..(1719)
atgaccgtcaacgagcccgtacctgacaccttcgaggacacccccgcgggggaccggcacccggactggttcaaacgagccgtcttctacgaggtcctcgtccgctccttccaggacagcaacggcgacggcatcggtgatctcaagggcctgaccgccaagctggactacctgcaatggctcggcgtggactgcctgtggctcccgcccttcttcaagtcaccgctgcgcgacggcggttacgacgtctccgactacaccgccgtgctgccggagttcggcgacctggccgacttcgtggagttcgtggacgcggcgcaccagcgcggcatgcgcgtgatcatcgacttcgtcatgaaccacaccagcgaccagcacccgtggttccaggagtcccgcaagaacccggacggcccctacggcgactactacgtctgggccgacgacgacacccggtacgccgacgcccgcatcatcttcgtcgacaccgaggcctccaactggacccacgacccggtccgcggccagtactactggcaccggttcttctcccaccagccggacctcaactacgagaacccggccgtgcaggaggagatgctcgccgccctgaagttctggctggacctgggcgtggacggctaccgtctcgacgccgtgccctacctgtacgccgaggagggcaccaactgcgagaacctgcccgcctcccacgcgttcctcaagcgggtgcgccgcgagatcgacgcgcagtacccggacaccgtactgctggccgaggccaaccagtggccggaggacgtggtcgactacttcggcgactactccacgggcggcgacgagtgccacatggccttccacttccccgtcatgccccgcatcttcatggccgtgcgccgcgagtcccgctacccggtctccgaaatcctcgccaagacccccgcgatcccgtccggctgccagtggggcatcttcctgcgcaaccacgacgagctgaccctggagatggtcaccgacgaggaacgcgactacatgtacgcggagtacgccaaggacccgcgcatgcgcgccaacatcggcatccgccggcggctggccaccctgctggacaacgaccgcgaccagatcgagctgttcaccgccctgctgctcgccctcccgggatccccgatcctctactacggcgacgagatcggcatgggcgacaacatctggctcggcgaccgcgacgccgtgcgcacccccatgcagtggacgcccgaccgcaacgccggcttctcgacctgtgacccgggccgcctctacctgcccgcgatcatggacccggtctacggctaccaggtgacgaatgtcgaggcgtccatggcctcgccctcctccctgctgcactggacccggcgcatgatcgagatccgcaagcagaaccccgccttcggcctcggcacctacaccgaactgccctcctccaacccggcggtgctcgccttcctgcgggagtacgaggacgacctggtgctgtgcgtgaacaacttcgcacggttcgcccagcccaccgagctggatctgcgcgagttcgccggacgccatccggtcgagctgttcggcggggtccgcttccccgccatcggcgaactgccgtacctgctgaccctcgggggccacggcttctactggttccggctcacccgagtcgcatcccgcatcggccgccgcgcttga

SEQ ID NO: 72 - protein, 572 aa, Streptomyces coelicolor A3(2)
MTVNEPVPDTFEDTPAGDRHPDWFKRAVFYEVLVRSFQDSNGDGIGDLKGLTAKLDYLQWLGVDCLWLPPFFKSPLRDGGYDVSDYTAVLPEFGDLADFVEFVDAAHQRGMRVIIDFVMNHTSDQHPWFQESRKNPDGPYGDYYVWADDDTRYADARIIFVDTEASNWTHDPVRGQYYWHRFFSHQPDLNYENPAVQEEMLAALKFWLDLGVDGYRLDAVPYLYAEEGTNCENLPASHAFLKRVRREIDAQYPDTVLLAEANQWPEDVVDYFGDYSTGGDECHMAFHFPVMPRIFMAVRRESRYPVSEILAKTPAIPSGCQWGIFLRNHDELTLEMVTDEERDYMYAEYAKDPRMRANIGIRRRLATLLDNDRDQIELFTALLLALPGSPILYYGDEIGMGDNIWLGDRDAVRTPMQWTPDRNAGFSTCDPGRLYLPAIMDPVYGYQVTNVEASMASPSSLLHWTRRMIEIRKQNPAFGLGTYTELPSSNPAVLAFLREYEDDLVLCVNNFARFAQPTELDLREFAGRHPVELFGGVRFPAIGELPYLLTLGGHGFYWFRLTRVASRIGRRA

SEQ ID NO: 73 - DNA, 3351 bp, Xanthomonas campestris pv. campestris str. ATCC 33913
  CDS (1)..(3351): transl_table=11
atgaatgcagttccagcccttcaggctgacgcagaacaatcggcagtggttgccgaccagctttggtacaaggacgcgatcatctaccaggtgcacgtcaagtcgttcttcgactccaatgacgatggcatcggcgatttccccggcctgatttccaagctcgactacatcgccgaactgggcgtggacacgatctggttgctgccgttctaccccagcccgcgccgcgacgacggctacgacatcgccgaatacatggcggtgcatccggactacggcaccatcgccgacttcgagcagctggtggcgcaggcgcatgcgcgcggcatccgcatcgtcaccgagttggtgatcaaccacacctccgatcagcatccgtggtttcagcgcgcccgcaacgcgccggctggttcgccggagcgcgacttctacgtctggtcggacaccgaccaggaatacgaaggcacgcgcatcattttctgcgataccgaaaagtccaactggacctgggacccggtggccggccagtacttctggcaccggttctattcgcaccagcccgatctcaacttcgacaacccggcggtgctggaatcggtgctggaagtgatgcgcttctggctggaccgcggcgtggacggcctgcgcctggatgcggtgccgtatttgatcgagcgctcgggcacctcgaatgaaaacctgccggaaacccacgccatcctgcgcaagatccgcgccacgctggatgccgaatacccggaccgcatgctgctggccgaggccaacatgtggccggaagacacccagcaatacttcggccaaaacgccgacgaatgccacatggcgttccacttcccgctgatgccgcgcatgtacatggcgatcgcgcgcgaagaccgcttccccatcaccgacatcatgcggcagacaccggagatcccggagacctgccagtgggcgatcttcctgcgcaaccatgacgagttgacgctggaaatggtcaccgattcggagcgcgattacctgtggcagacctatgcctcggaccgccgcgcgcgcatcaacttaggcatccgccgccgcctggcgccgctgctggagcgcgaccgccgccgcatcgaattgatgacctcgttgctgctgaccatgcccggcacgccggtgctgtattacggcgatgagatcggcatgggcgacaacatccatctgggcgaccgtgatggtgtgcgtaccccgatgcagtggtcgatcgaccgcaacggtggcttctcgcgtgccgacccggctgcactggtgctgccgccggtcatggacccgctgtacggcttccaggcggtgaacgtggaagcgcagatccgcgaccagcattcgctgctgacctggacccgccgcgtgctcagcgtgcgcaagcgctaccaggcgttcggccgcggcacgctgcgctttttgtacccgggcaaccgccgcatgctggcctacctgcgctgctatcaggacgaaaccgtgctgtgcgtggccaacctctcgcacaccttgcaggcggtggagttggacctgtccgagttcgaaggccgcgtgccggtggacatcatcggcggtggcagcttcccgccgattggccggctgacctatctgctgaccgtgccgccatttggtttctatgcgttccagctggtcagcgaaggcacgctgccggactggcatgtgcccagcccggtgccgttgccggattaccgcacgctggtgctgcgcagcgacaccgaagagagcgccgcactgctgccgcatctggccacgctggaaggcgagatcctgccggcgtggttatcggcacgccgctggttctcggccaaggaccaggcgctcaagagcgtgcgcatttctcggcgcacaccgttgccgggcgatgagccgatgagcctgctggagctggatgtggagctggaagacggccaccacgagtgctacatgctgccggtgggcatcgtctgggagcgcgagcacccgagcacgctggccgagcagctggcgctggcgcgcgtgcgccagggccgcgaggtggggtatctcaccgacgcgttcgcgctcaagccgatggtgcgcggcgtgatcgatgcactgcgccacgacgcggcgctggatttccacgacggcgacgatgcctcgcaacaaggccaggtgcgtttcgaatcgaccccggcgctggccgcgctggagattccggacgacccggagatccgctggttgtcggccgaacagagcaacagctcgctggtcgttgcggacaaggcggtgttcaagctgctgcgccacgtggccaccggtgccaatccggaaatcgagatcggccgccgcctcaccgagatgggctacgccaatgcggcgccgctgctgggcagcgtgagccgggtggacgcgcagggcaccatcaccaccatcgcactgttgcagggcttcatccgcaaccagggcgatgcctggcgttggacgctcgatcacctggcgcgcagtttcgacgaatacgccaccgcgcagaccgacgaagcccgcaacgaagcggtggccggctacgacgcgtttgccgcagtggtgggcaagcgcctggccgagttgcacgaggcactctcgcgcagcaccgacgatgccgacttcgcaccacagcgtatcgacctgcccacagccaacgatgtggtgggcggcgtggcacgccaggtggaggaaatgtgggaaacagtgcacgcccgcctgggcgccaccgacgatgcggccgaacgcgaggcgctggaatcggtgctggccgaacgcccgcagctggatgcgctgctggccaaggcgccaagcgtgctggccgaatcgctgttgacccgcgtgcatggcgacttccacctgggccagatcctggtggcgttcgacgacgtggtgctgatcgacttcgaaggcgagcccgccaagccgctggccgagcgccgcgccaaggccagcccgttgcgcgatgtggccggtttcctgcgctcgctcgattacgccagcgaagtgtctgcgcgtggcgaagagggcaccgccgcacgtgccggtgtgggggtggatgcgcacctggatgacttcctggtggaattccgccgccgctccacgcaatcgttcctggacgcttaccatgccgtgctcgacgccagcgcgcatccgtggatcgcgccggcggcgttcaatgcggccaccttgctgttcctggtggagaaggcctgctacgaggtgcgctacgaagcggcgaaccggccgggctggttgatggtgcccatccagggcttgcgacgcatcctgcaacgcgcgcgcgctggtgcgggagacacatga

SEQ ID NO: 74 - protein, 1116 aa, Xanthomonas campestris pv. campestris str. ATCC 33913
MNAVPALQADAEQSAVVADQLWYKDAIIYQVHVKSFFDSNDDGIGDFPGLISKLDYIAELGVDTIWLLPFYPSPRRDDGYDIAEYMAVHPDYGTIADFEQLVAQAHARGIRIVTELVINHTSDQHPWFQRARNAPAGSPERDFYVWSDTDQEYEGTRIIFCDTEKSNWTWDPVAGQYFWHRFYSHQPDLNFDNPAVLESVLEVMRFWLDRGVDGLRLDAVPYLIERSGTSNENLPETHAILRKIRATLDAEYPDRMLLAEANMWPEDTQQYFGQNADECHMAFHFPLMPRMYMAIAREDRFPITDIMRQTPEIPETCQWAIFLRNHDELTLEMVTDSERDYLWQTYASDRRARINLGIRRRLAPLLERDRRRIELMTSLLLTMPGTPVLYYGDEIGMGDNIHLGDRDGVRTPMQWSIDRNGGFSRADPAALVLPPVMDPLYGFQAVNVEAQIRDQHSLLTWTRRVLSVRKRYQAFGRGTLRFLYPGNRRMLAYLRCYQDETVLCVANLSHTLQAVELDLSEFEGRVPVDIIGGGSFPPIGRLTYLLTVPPFGFYAFQLVSEGTLPDWHVPSPVPLPDYRTLVLRSDTEESAALLPHLATLEGEILPAWLSARRWFSAKDQALKSVRISRRTPLPGDEPMSLLELDVELEDGHHECYMLPVGIVWEREHPSTLAEQLALARVRQGREVGYLTDAFALKPMVRGVIDALRHDAALDFHDGDDASQQGQVRFESTPALAALEIPDDPEIRWLSAEQSNSSLVVADKAVFKLLRHVATGANPEIEIGRRLTEMGYANAAPLLGSVSRVDAQGTITTIALLQGFIRNQGDAWRWTLDHLARSFDEYATAQTDEARNEAVAGYDAFAAVVGKRLAELHEALSRSTDDADFAPQRIDLPTANDVVGGVARQVEEMWETVHARLGATDDAAEREALESVLAERPQLDALLAKAPSVLAESLLTRVHGDFHLGQILVAFDDVVLIDFEGEPAKPLAERRAKASPLRDVAGFLRSLDYASEVSARGEEGTAARAGVGVDAHLDDFLVEFRRRSTQSFLDAYHAVLDASAHPWIAPAAFNAATLLFLVEKACYEVRYEAANRPGWLMVPIQGLRRILQRARAGAGDT

SEQ ID NO: 75 - DNA, 1617 bp, Xanthomonas campestris pv. campestris str. ATCC 33913
  CDS (1)..(1617): transl_table=11
atgtcgcagacaccatggtggcgcggggccgtcatttatcagatttatccgcgtagttttctggattccaatggcgatggcgtaggcgatctgccgggcatcattgccaagctcgactacatcgccgggctgggagtagatgcgatctggatttcgccttttttcaagtcgccgatggccgatttcggctatgacatcgcagactatcgcgcggtggacccgttgttcgggtcgttggtcgatttcgatcgcttgctcgaaaaggcacatggccttgggttgaaagtgatgatcgatcaggtactgagccattcctcgatcgcgcatgtgtggtttcaggagagccgacaggaccggagcaacccgaaggctgattggtacgtgtgggccgatccgcgcgaggatggaacgccgccgaacaactggctgtcgttgtttggtggggtcgcatggcagtgggagccgcggcgtgagcagtactacctgcacaactttctggtggaccagcccgatctcaatttccacaacgccgaggtgcagcaggcaacgctcgataacgtgcggttctggctcgatcgcggtgtggatgggttccgtctggatgcgatcaacttctgctttcacgacgcgcaactgcgcgataacccggccaagccggcagacaagcgggtggggcgcggcttcagcgcggacaatccttacgcctaccagtatcattacttcaacaacacgcagccggaaaatctagcgttcctcgagcgcctgcgcgggctgctggatctttatccgaatgcagtgagccttggcgagatctcgtcggaagattcgctggccaccaccgccgaatacaccgcccagggccgcttgcatatgggctacagcttcgagctgctggtgcaggattacagcgctgcctacatccgcgacaccgtaagccggctcgaggccaccatgttggagggctggccatgctgggccatttccaatcacgacgtagtgcgcgcggtaacgcgctggggtggggcgcatgcgacgccggcgttcgcgcggatggtggtggcgctgctgtgttcgctgcgtggatcgatctgcctatatcagggcgaagagctcgggctcagtgaggcagaggtggcgttcgaggacctgcaggatccgtatggaataactttctggccgaccttcaagggccgggatggctgccgtacgccgatgccatggaccgacgcgccatctgccggattcaccagcggcaagccttggctgccgttagctgcgtcgcatcgtgccgctgctgtgagcgtgcaacaggatgatgcgcattccgtgttgagtgcagtacgggattttctagcttggcgcaaagagatgccggcgctgcgtgagggatccatcgctttctacgacacggccgaaccggtgctgatgttccgccgcgaacacgccggccaggttgtgctgttggcattcaatctgtccgccgatcctgccgacctggctttgcctgcaggcgagtgggagcaggtcgatgtacctggtgtcgagcttggggcgatggatggcggacacctaaggctggccgggcatgcggtcgttgctgctgtcggtcgtggctga

SEQ ID NO: 76 - protein, 538 aa, Xanthomonas campestris pv. campestris str. ATCC 33913
MSQTPWWRGAVIYQIYPRSFLDSNGDGVGDLPGIIAKLDYIAGLGVDAIWISPFFKSPMADFGYDIADYRAVDPLFGSLVDFDRLLEKAHGLGLKVMIDQVLSHSSIAHVWFQESRQDRSNPKADWYVWADPREDGTPPNNWLSLFGGVAWQWEPRREQYYLHNFLVDQPDLNFHNAEVQQATLDNVRFWLDRGVDGFRLDAINFCFHDAQLRDNPAKPADKRVGRGFSADNPYAYQYHYFNNTQPENLAFLERLRGLLDLYPNAVSLGEISSEDSLATTAEYTAQGRLHMGYSFELLVQDYSAAYIRDTVSRLEATMLEGWPCWAISNHDVVRAVTRWGGAHATPAFARMVVALLCSLRGSICLYQGEELGLSEAEVAFEDLQDPYGITFWPTFKGRDGCRTPMPWTDAPSAGFTSGKPWLPLAASHRAAAVSVQQDDAHSVLSAVRDFLAWRKEMPALREGSIAFYDTAEPVLMFRREHAGQVVLLAFNLSADPADLALPAGEWEQVDVPGVELGAMDGGHLRLAGHAVVAAVGRG

SEQ ID NO: 77 - DNA, 1617 bp, Xanthomonas axonopodis pv. citri str. 306
  CDS (1)..(1617): transl_table=11
atgttgcagacaccatggtggcgcggggccgtcatctatcagatctatccgcgtagctttccggattccaatggcgatggggtcggcgatctgccgggcatcatcgccaagctcgactacatcgctgggctgggcgtggatgccatctggatctcgccgtttttcaagtcgccgatggcagatttcggctatgacatcgcggactaccgtgcggtggatccgttgttcggaacgctggacgatttcgaccgtctgctcgacagggcgcatgcgcttggcctgaaggtgatgatcgatcaggtgttgagccacacctcgatcgaacatgcgtggttccaggaaagccggcaggaccggaccaatgcgaaggcggattggtatgtgtgggccgatccgcgcgaggacggaacgccgcccaacaactggttgtcgctgttcggtggtgtggcgtggcagtgggagccgcggcgcgagcagtactacctgcataacttcctggtcgatcagccggacctcaatttccataatgcggaggtgcagcaggcaaccctggacaatgtgcggttctggttggatcgtggagtagatggctttcgcctggacgcgatcaacttctgcttccatgacgcgcagctgcgcgataacccggccaagccggccgacaagcgggtggggcgtggctttagcgcggacaatccgtacgcctatcagtaccactacttcaacaacacgcagccggagaacctggcgttcctggagcgcctgcgtgcgctgctcgatcgctatccggatgcggtaagcctgggcgaaatctcttcggaagactcgctggcgaccacggccgaatacaccgccaagggccgcttgcacatgggctacagcttcgagctgttggtgcaggattacagcgcggcgtacatccgcggaacggtcagcaggctcgaggccaccatgttggaaggatggccgtgctgggccatttccaaccacgatgtggtgcgtgcggtgacgcgttggggcggtgaagatgcgtcgcctgcgttcgctcgcatggtagttgcgctgctatgttcgttgcgtggctcggtttgcctgtaccagggcgaggagcttgggctaggcgaggcggatgtggcgttcgaggatctgcgggatccgtacggcatcacgttctggccgaccttcaagggccgcgatggatgccgtacgccgatgccgtggaccgatgcgccgtcggcgggtttcaccagcggcaagccgtggttgccgttgtccgagccgcatcgtctggctgcagtgagtgtgcagcaggacgatgcccagtctgtgctgcgcgcagtgcgggcatttctgagttggcgcaggagcatgccggccctgctcgaaggggcgatcgcgttctacgacatcgcagagccggtgctgatgttccggcgtgagcatgcgggccaggtcatgctgttggcgttcaatttgtctgcagacatcaccgagctggcactgcctgcgggtgcatggcgccagatcgatgtgccgggggtggagcgtggcgtgatcgagcatggccgcgtgcgcttgccggggcatgctgtggtttgcgcaatgggcgggcagtga

SEQ ID NO: 78 - protein, 538 aa, Xanthomonas axonopodis pv. citri str. 306
MLQTPWWRGAVIYQIYPRSFPDSNGDGVGDLPGIIAKLDYIAGLGVDAIWISPFFKSPMADFGYDIADYRAVDPLFGTLDDFDRLLDRAHALGLKVMIDQVLSHTSIEHAWFQESRQDRTNAKADWYVWADPREDGTPPNNWLSLFGGVAWQWEPRREQYYLHNFLVDQPDLNFHNAEVQQATLDNVRFWLDRGVDGFRLDAINFCFHDAQLRDNPAKPADKRVGRGFSADNPYAYQYHYFNNTQPENLAFLERLRALLDRYPDAVSLGEISSEDSLATTAEYTAKGRLHMGYSFELLVQDYSAAYIRGTVSRLEATMLEGWPCWAISNHDVVRAVTRWGGEDASPAFARMVVALLCSLRGSVCLYQGEELGLGEADVAFEDLRDPYGITFWPTFKGRDGCRTPMPWTDAPSAGFTSGKPWLPLSEPHRLAAVSVQQDDAQSVLRAVRAFLSWRRSMPALLEGAIAFYDIAEPVLMFRREHAGQVMLLAFNLSADITELALPAGAWRQIDVPGVERGVIEHGRVRLPGHAVVCAMGGQ

SEQ ID NO: 79 - DNA, 3327 bp, Chlorobium tepidum TLS
  CDS (1)..(3327): transl_table=11
atgcctaaaaaacaagctgtaacaagctatcagccggagtcgctctggtacaaggatgccattatttatgaactacatgtcaaaaccttctgtgacagcgataacgatggcatcggtgattttcgcggcctgaagagccgcctcggctaccttgaaagcctcggagtgacggcgatctggattctgccgttctacccctcgccactgcgcgacgacggctacgacatcgccgattacaagtcggtcaatcccgactacggcacgatcgaggatttccgcgacttcctcgaagaggcgcatcggcgcggcatcaaggtgattaccgagctggtggtgaaccacacctccgaccagcacgagtggttcaaaaaagcccgcaaggctccgaaagggtcgccggagcgcgacttttacgtctggagcgacgacccgacgaagtatggcgaggcgcgcattattttccaggacttcgaggcttcgaactggacctgggatcccgtggctggccagtactactggcaccgctttttccatcaccagcccgacctgaacttcgagaatcccgccgtgcaccaggcgctgttcgacgtgctcgatttctggctcggcatgggagtggatggcctgcggcttgatgccgtaccctacctctacgaggctgaaggcaccaactgtgagaacctgccgcagaccttcgagttcctgcgcaagctgcgctcttatgtggacgagcattatcccaaccggatgcttcttgccgaggctaaccagtggccggaggactccgccgcctatcttggcaagggggacatgtgccacatgaacttccatttcccgctcatgccgcgcatgtatatggcgctggctaccgaggatcgttttccgatcatcgacattctcgcccagacgcccgaaattccggagagctgccagtgggcgtcgttcctgcgcaaccacgacgagctgacgcttgaaatggtgaccgacgaggagcgcgactacatgcgccgcgtttatgcccacgatgtcaaggcgcgcatcaacctcggcatccgccgccgcctcgcgccgctcatgtcgaacgaccgccgccgcatcgagctgatgaacatcatgctgctctccctgcccggtactccggtgctctattacggcgacgagatcggcatgggcgacaactactacctcggcgaccgtgacggcgtgcgcaccccgatgcagtggaacgccgaccgcaacgcgggcttttcgcgtgccaatccgcagcgcctgcttctgccggtgatcatcgaccccgagtaccactatgaagcggttaacgtcgaggtgcaggagtccaatcccaactcgctgctctggtggatgcgccacaccatcgccacggcccgccgcttccgagcgttcagccgcggcaccatcgagttcctcaacgccaacaaccccaaggtgctgatgtttatccgctcgtacgaagatgaaaccatcctcaccgtgatcaacctgtcccgcaacgcacaggtgatcaacgtcgatctttccgcttatgagggatgcgtgccggaggagattttcagcatgaaccgcttcccgagagtgcacaaaacaccatatatggtcgcgctcggaccatacggctatttctggcttcggctgatccgcgaggagtcgccggcggacaggtctgccctgcttgaaaaggttgcccttcgtgccggaagctggcaggagctgtttgttggccgcagtctcgaccagttcgaaaccgctattctgccaccctattacaagagcgtgcgctggttcgggggcaaagcccgcaatatcatcagaatcagggtgaccgataccgtgccggtcgccggaatggagaacactgcgtttgcgatgactgaagtgaactatccgagtggcgagaatgaacgctaccagcttccgctgaccttcgtgccagtggagcgaggtaaccttgcggatgagttgttctaccgtcatgccatagcaagggttgaacttgatggccttgaagggttcctcatcgacgcttcagccgacgagaccttccgttcaaggctgctcgatcttatcctgcacagagagacctggtccggcgcagctggcaagatcaccgcggatgccggcaagatgctcgaaaacagttgcctctcgaccgccggcgaagagccgcccgcctcgcatctgatgggcctggaacagagcaatacctcgattcgctacggtgagcagctctgcctgaagctctaccgcaagatcgacagcggcatggcacccgaaatcgaaatctcccgcgtgctgaccgatcagacagagtaccggaacattccggtctatctcggctcgtttgactacggcaaaagctaccgggagcgctgttcgctcggcattctccagaatttcgttccgaatgaatccgacggctggcagttgagtctcggccatgtccgccggtactatgaggatgtattgtcgcgctgttcgcagggcgtgcttccgccaacgctgccggaactttctggcaccacaagcaaactgccggagcttatccatgagctgatcggcgagttctatttccagatggtcggcaagcttgctgagcgcacggccggtatgcatcgtgcgctcggctctgtcgataccgatgctgctttctcgcccgagccgttcacgacgctctaccagcgctccatctatcaggcgatgactgaccaggtcaagcgcagcatgatcttcctgcgtgaatccatacacgccgttcccaaggaggcccgtccgcttgcccataagctgctcgatatgcagaaggagattctcgaacagttcgagccgatccgcaaggagaagatcgacacggtcaagatcaggattcacggtgactaccatctcggccaggtgctctacaccggtaatgacttcgtgattctcgatttcgagggcgagccggcccgctcactctcggagcgcaagatcaaacgctcggtctaccgcgacctcgcgggtatgctgcgttcgttcgactacgcggccttcaacgtgctgatgcagaaccaggctatccggcccgaagatcgcaaggcgctcgagccgtgggccgagctttggagctactatgttggtcagcattttatcgatgtctatacgcagcaaaccgaaggttcgggcctgattcccaaagagccgcgccagcgtgagctgctcctgcgcagctacctgatgaacaaggcgatctacgagctgaactacgagctgaacaaccgccccgagtggctgccgattccaatgaacggcatcctgcgcctcatccgtaactga

SEQ ID NO: 80 - protein, 1108 aa, Chlorobium tepidum TLS
MPKKQAVTSYQPESLWYKDAIIYELHVKTFCDSDNDGIGDFRGLKSRLGYLESLGVTAIWILPFYPSPLRDDGYDIADYKSVNPDYGTIEDFRDFLEEAHRRGIKVITELVVNHTSDQHEWFKKARKAPKGSPERDFYVWSDDPTKYGEARIIFQDFEASNWTWDPVAGQYYWHRFFHHQPDLNFENPAVHQALFDVLDFWLGMGVDGLRLDAVPYLYEAEGTNCENLPQTFEFLRKLRSYVDEHYPNRMLLAEANQWPEDSAAYLGKGDMCHMNFHFPLMPRMYMALATEDRFPIIDILAQTPEIPESCQWASFLRNHDELTLEMVTDEERDYMRRVYAHDVKARINLGIRRRLAPLMSNDRRRIELMNIMLLSLPGTPVLYYGDEIGMGDNYYLGDRDGVRTPMQWNADRNAGFSRANPQRLLLPVIIDPEYHYEAVNVEVQESNPNSLLWWMRHTIATARRFRAFSRGTIEFLNANNPKVLMFIRSYEDETILTVINLSRNAQVINVDLSAYEGCVPEEIFSMNRFPRVHKTPYMVALGPYGYFWLRLIREESPADRSALLEKVALRAGSWQELFVGRSLDQFETAILPPYYKSVRWFGGKARNIIRIRVTDTVPVAGMENTAFAMTEVNYPSGENERYQLPLTFVPVERGNLADELFYRHAIARVELDGLEGFLIDASADETFRSRLLDLILHRETWSGAAGKITADAGKMLENSCLSTAGEEPPASHLMGLEQSNTSIRYGEQLCLKLYRKIDSGMAPEIEISRVLTDQTEYRNIPVYLGSFDYGKSYRERCSLGILQNFVPNESDGWQLSLGHVRRYYEDVLSRCSQGVLPPTLPELSGTTSKLPELIHELIGEFYFQMVGKLAERTAGMHRALGSVDTDAAFSPEPFTTLYQRSIYQAMTDQVKRSMIFLRESIHAVPKEARPLAHKLLDMQKEILEQFEPIRKEKIDTVKIRIHGDYHLGQVLYTGNDFVILDFEGEPARSLSERKIKRSVYRDLAGMLRSFDYAAFNVLMQNQAIRPEDRKALEPWAELWSYYVGQHFIDVYTQQTEGSGLIPKEPRQRELLLRSYLMNKAIYELNYELNNRPEWLPIPMNGILRLIRN

SEQ ID NO: 81 - DNA, 1668 bp, Yersinia pestis KIM
  CDS (1)..(1668): transl_table=11
atgaataatccaatcccttggtggcaacatggtgtcatctatcagatttacccgaagagctttcaggacagtaccggtaatggctatggtgacctggcaggcgttgcgcagcggctggattatctgcaaaagctgggcgttgatgccatttggctgacaccggtgtatgtctcgccacaagtggataacggttatgacgtggcggattactgcgccattgaccccgcttatggcacattggatgactttaaacgtttggtcgcgggtgctcatcagcgaggcatacgcatcatcatggatatggtgttcaatcacacctccacagaacatgcctggtttaaagcttcgcaggatcgtaatagcccttatcggcaattttatatttggcgtgacggtgacggtggagacggcagtttaccgaataactggcgctcgaaattcggtggtcacgcatggcagtggcacgcggccagcggccagtattatctgcatttgtttgccccagagcaggctgatctgaattgggaacaccaaccggtacgcgatgagctcaaaaaggtgtgtgaattttgggccgatctgggggttgatggtctgcgtttggatgtcatcaatctggtgtccaaacagcaggatttccctaatgatctggacggcgatggccgccgtttttataccgatggcccacgcattcatgagtttttgcaggaactgagccgcgatgtgttccagccacgccgcctgatgacggtaggcgagatgtcatccacccgtctcgagcattgtcagcgatatgcggcattaggcggtgatgagttatccatgacctttaatttccatcacctgaaagtggattatcttaacggtgaaaagtggtcattgatgccgccgaatcgggtggagttgaaacacatttttaatcagtggcagcaagggatgcacaaccgagcatggaacgcactattttggtgtaatcacgatcaaccacgcattgtctcgcgttttggtcatgaaggcgcactacgtttgccagcggcaaagatgctggcgatggtactgcacggtatgcagggcacgccttatatttatcagggggaagaaattggcatgacgaaccccaatttcactgatatcactcaataccgtgatgttgaaagcctgaatatgtttgccgaactgagtgtggcaggccgcgaacccgatgagttattggcgattctggcagctaaatcccgtgataatagccgtacccccatgcaatgggatagcagcgataatgcgggtttcagccaaggcactccctggattgccccttgcagcaattatcatgagattaacgttaatgccgcattggccgacgctgactcggtgttttatgcctatcaatacctgatagccctgcgtaaacaatacgatattttcactttcggtgattatcaggatctttgcccacagcaccctgatttatggtgctatttgcgcagttggcaagggaagcaactgttggtagtcgctaacctgagtgaagagccccagcgatggcaacccgagggcctcacgctggacggtaattggcaattattgatgagcagctacgaccaaagcgccttccaaccgcaagatatgatattacgcggatatgaggggatttattgggtatgtgagtaa

SEQ ID NO: 82 - protein, 555 aa, Yersinia pestis KIM
MNNPIPWWQHGVIYQIYPKSFQDSTGNGYGDLAGVAQRLDYLQKLGVDAIWLTPVYVSPQVDNGYDVADYCAIDPAYGTLDDFKRLVAGAHQRGIRIIMDMVFNHTSTEHAWFKASQDRNSPYRQFYIWRDGDGGDGSLPNNWRSKFGGHAWQWHAASGQYYLHLFAPEQADLNWEHQPVRDELKKVCEFWADLGVDGLRLDVINLVSKQQDFPNDLDGDGRRFYTDGPRIHEFLQELSRDVFQPRRLMTVGEMSSTRLEHCQRYAALGGDELSMTFNFHHLKVDYLNGEKWSLMPPNRVELKHIFNQWQQGMHNRAWNALFWCNHDQPRIVSRFGHEGALRLPAAKMLAMVLHGMQGTPYIYQGEEIGMTNPNFTDITQYRDVESLNMFAELSVAGREPDELLAILAAKSRDNSRTPMQWDSSDNAGFSQGTPWIAPCSNYHEINVNAALADADSVFYAYQYLIALRKQYDIFTFGDYQDLCPQHPDLWCYLRSWQGKQLLVVANLSEEPQRWQPEGLTLDGNWQLLMSSYDQSAFQPQDMILRGYEGIYWVCE

SEQ ID NO: 83 - DNA, 1830 bp, Yersinia pestis KIM
  CDS (1)..(1830): transl_table=11
atgcttagtggttggcaccttccggtctcgccttttgttcgtttggcagacgacgcattacatatcacgctctggttgcaaggtgatagtttacctgcgcaagtctttctgcgttgtgagccagataatgaagagtggctgctcactatggaggggcatgagagccatgatcgttggcgctatagcgtttctttaccgttatatgaggggcagccaacccggcgctactgcttcaaactattatgggatgaccgccaacagtggtttggcccgttggggttctcggtgattcctccagcacagttggcacagtttgctgtagatgtacccgatagcgggcctgattgggtcgcggaccaagttttttatcagatcttccccgatcgctttgccagtagtcaggcagatcatggtgtgcaggaggggagttatattcatcatgcggccggttgcccggtatctcgccgcgagtggcagcagccattggatgatgtgcatgccgcatcgacattttatggtggcgatctggccggtattagtcagaaaatcccttactttcaacaactgggggttacggcactgtatttgaaccctatttttaccgctcccagtgtgcataaatatgatactgaagattattatcaggttgatccctacttggggggagagcgtgatttcttgcaattgcgagccgctacccgtgaagtaggaataaagttggtgctcgatggcgtgtttaaccacacgggtgattctcatcgctggtttgatcgctatcaacaaggggaaaacggcgcctgccatcacgaagattcgccttatcgtggttggtttacgttcctccctgatggacgagcattagattggaaaggtaatgccagtttgccaaaacttaattttgccaatgaagaggtcgctgaacgaatctatcgcagtgatgacagcgtcgtgcgttattggttacggccaccatacagtattgatggctggcgtctggatgtcgtacacatgctcggggaagatggcggcgctaaagggaatttgcaccatctgcacggtatctatcaggcagcaaaagaagaaaatccgcaggcttatattctgggcgaacattttggcgatgcacgtaattggttgcacgctggagtggaagacgcggcaatgaattatatgggttttgctttgccggtccgcagttttctcgccgagctagatgtggcttgccatcctataaaattggatgctgcggattgcgcctactggatggatgagtaccgcgcaggattgccccatagccagcaactccgtttatttaatcaattagatagccatgatactgcccgttttcttaccttattaaagggtgataaaacccgtatgcaaatggcgctaatatggttgtttagttggattggtgtgccttgcctattttatggtgatgagattgggctggatggagggaatgatccgttctgccgcaaaccgttcccgtgggatgaggctcagtgggatcatgacctattatcactgtgtcaacgtatggcggctttacgccacaaaagcatagcgttgcggcgcggggggtgtcaggtgatccatgccagtggtgattccctggtctttattcgtagctatcaaactgagcgtgtgatggtggcgatacaacgttccgatgatgcggatattttcctgcccgcctctcctttactcaatgtggctgagtggcagcgtctggaaggtggaggagacctggctgtcagtgagactggggtaaacatggggctggagggtaagagtgttaccttgtggtgtggtgttggtgagtgctaa

SEQ ID NO: 84 - protein, 609 aa, Yersinia pestis KIM
MLSGWHLPVSPFVRLADDALHITLWLQGDSLPAQVFLRCEPDNEEWLLTMEGHESHDRWRYSVSLPLYEGQPTRRYCFKLLWDDRQQWFGPLGFSVIPPAQLAQFAVDVPDSGPDWVADQVFYQIFPDRFASSQADHGVQEGSYIHHAAGCPVSRREWQQPLDDVHAASTFYGGDLAGISQKIPYFQQLGVTALYLNPIFTAPSVHKYDTEDYYQVDPYLGGERDFLQLRAATREVGIKLVLDGVFNHTGDSHRWFDRYQQGENGACHHEDSPYRGWFTFLPDGRALDWKGNASLPKLNFANEEVAERIYRSDDSVVRYWLRPPYSIDGWRLDVVHMLGEDGGAKGNLHHLHGIYQAAKEENPQAYILGEHFGDARNWLHAGVEDAAMNYMGFALPVRSFLAELDVACHPIKLDAADCAYWMDEYRAGLPHSQQLRLFNQLDSHDTARFLTLLKGDKTRMQMALIWLFSWIGVPCLFYGDEIGLDGGNDPFCRKPFPWDEAQWDHDLLSLCQRMAALRHKSIALRRGGCQVIHASGDSLVFIRSYQTERVMVAIQRSDDADIFLPASPLLNVAEWQRLEGGGDLAVSETGVNMGLEGKSVTLWCGVGEC

SEQ ID NO: 85 - DNA, 1608 bp, Streptococcus agalactiae 2603V/R
  CDS (1)..(1608): transl_table=11
atgaagaaacactggtggcataaagctacgatttatcaaatttacccacgttcatttatggattcagatggtgatggtgtgggggacattaaagggattactagcaaactagactaccttgaaaaattagggattactgctatctggttatcacctgtttatcaaagtccaatggatgacaatggttatgatatttcagattatcaagccattgcagatatttttggtgatatgaatgatatggaccaactgttacaagaggcaaatcaacgcgggattaaaatcatcatggatttggtagtgaatcatacctctgatgaacatgcttggttcgtagaagcgcgagaaaaccctaatagtcctgaacgtgatttttatatttggcgagatgaacctaacgatttgacttctatttttagtggctcagcttgggaatatgataaagtatcaggtcaatattatttgcacctttttagcaaacgtcagccagatctcaactgggagaatgaagctttacgtcataaaatttatgatatgatgaatttctggattgataagggtattggtggtttccgtatggatgtcattgatttaattgggaaaattccagataagggcattactggtaatggaccaaaacttcatgattatcttaaagaaatgaacagagctagttttggaaagcatgacttattgacggtgggtgaaacttggggagcaacgccagacattgcaaaacaatactcaaatcccgataatgaagaattatctatggtctttcaatttgaacatgtaggtcttcaacataaacctgacgctcctaagtgggattacagtgacggattagatgttccagcattgaaagatatttttacaaaatggcaaacacaattggagcttggccaaggttggaattctttattctggaataatcatgaccttcctcgagtgctctcgatctggggaaatgatagtgataacagaaaacaatctgccaaggctctagcaatcctactacatttgatgcgtggaacgccttatatctatcaaggtgaagaaattggtatgactaattatccatttgagtgtttagcagatgtagatgatattgaatcccttaactatgctaaagaagccatggataatggggtatctgaagcaacaattttagatagtattcgtaaagtcggtcgtgataatgctcgtactccaatgcagtggagtcaagaacatcaagctggttttactaaaggtaccccatggctagcagtcaatcccaattatcaggaaattaatgtggaggcagcgttaaatgatacggaaagtattttttatacttatcaaaaattagttgctttacgtaaagaacacgactggttagttgatgctgattttaaacttttggaaacagcagataaggtatttgcttatgttcgtcaaacagataaagaacgttatttaatagttgcgaacttatccgatcaaaaccaatcttttgaatttccagaagctgttaaagaaactattatttcaaatacagaggttcaagaagtactatcaagtaacactctcaagccgtgggatgccttctgcatagagctattctaa

SEQ ID NO: 86 - protein, 535 aa, Streptococcus agalactiae 2603V/R
MKKHWWHKATIYQIYPRSFMDSDGDGVGDIKGITSKLDYLEKLGITAIWLSPVYQSPMDDNGYDISDYQAIADIFGDMNDMDQLLQEANQRGIKIIMDLVVNHTSDEHAWFVEARENPNSPERDFYIWRDEPNDLTSIFSGSAWEYDKVSGQYYLHLFSKRQPDLNWENEALRHKIYDMMNFWIDKGIGGFRMDVIDLIGKIPDKGITGNGPKLHDYLKEMNRASFGKHDLLTVGETWGATPDIAKQYSNPDNEELSMVFQFEHVGLQHKPDAPKWDYSDGLDVPALKDIFTKWQTQLELGQGWNSLFWNNHDLPRVLSIWGNDSDNRKQSAKALAILLHLMRGTPYIYQGEEIGMTNYPFECLADVDDIESLNYAKEAMDNGVSEATILDSIRKVGRDNARTPMQWSQEHQAGFTKGTPWLAVNPNYQEINVEAALNDTESIFYTYQKLVALRKEHDWLVDADFKLLETADKVFAYVRQTDKERYLIVANLSDQNQSFEFPEAVKETIISNTEVQEVLSSNTLKPWDAFCIELF

SEQ ID NO: 87 - DNA, 1497 bp, Oceanobacillus iheyensis HTE831
  CDS (1)..(1497): transl_table=11
atgttaaatagaaataaattgcttctattgcttacagtgatttttgttttattgcctgtaactaatgtaaacgcagaagaaccaatcaatatacataatgaaattatttatgatattttagttgatcgttttaataatggagattctgaggaaacggaagaaattgctgtggatgacccgaatgcataccacggtggcgatattaaaggtataattgatcaactagatcgactaaaggaaatggggattactaccatttcattatcccctttaatgactaatcaacagaatggttatcacggatattgggtccttgattattttgaaatagacgagcaattaggaaccatggaagatcttaatcagttgattgaacaagcacatcaacgtgatatgaaagtagttatggatatggtaatcaattatgctgcagcatcacatgaagtaacagaagacgaaactaaagctgattggtggacggaaccttcttacacagctgcatcttggtctgctaatgcacttcaatggaatttgaatcaacctgaagttgcggagaatatgataaatgttgcagactactggatggaagagacggagatagatggttttacgttacatgctgttgatcaagcgccaattgactttcttcaagaatatacacaacatataaaagaaacagatgaagaattttatttaataggagatatattagatccagaatctgctaacattcaagaattagaagaaacacctctggatattgtagctaatcctatgctgcatgaacggttaaaacaagtattctctgatgtggataatccagtttctgaggtgtaccatcaatgggagaatttagagacagactctccgttaattacaattgataattttacagaagaacgttttaccaatgcatattcgaagaaccaacgaaattcactgacagcatggacactagcattgacatatatgtatactacaccaggaacacctctaattgttcaaggtacggagttgccaatgtatggtggagatgaagaggagtctcagcgacttgtaccatttaatagtggggacccagaattgaaagaatttcatactagaatagcgtctttacgaaatgaatttcctgcactacgacaaggtgacattgaactagtcgataccgttgattcgatgatagtctataaaagaagttatgaaggccaaacgatgtatgttgcgattaacaatggaagtgagtctgcttatgtagatgtaactgatgttgatgctaataaagagttacgcggccacttacaagataatttggttcgtgaaaaccaagaagggaatcatcgaattggaataccacgtgaatctgtagaagtgtatgaagtacaggatgatcatggtcttaactggtggtttattggatttattgttatggttattttggcctttattgctggagttatctatttgacaataaaacaacgcaagagagaaaagaaataa

SEQ ID NO: 88 - protein, 498 aa, Oceanobacillus iheyensis HTE831
MLNRNKLLLLLTVIFVLLPVTNVNAEEPINIHNEIIYDILVDRFNNGDSEETEEIAVDDPNAYHGGDIKGIIDQLDRLKEMGITTISLSPLMTNQQNGYHGYWVLDYFEIDEQLGTMEDLNQLIEQAHQRDMKVVMDMVINYAAASHEVTEDETKADWWTEPSYTAASWSANALQWNLNQPEVAENMINVADYWMEETEIDGFTLHAVDQAPIDFLQEYTQHIKETDEEFYLIGDILDPESANIQELEETPLDIVANPMLHERLKQVFSDVDNPVSEVYHQWENLETDSPLITIDNFTEERFTNAYSKNQRNSLTAWTLALTYMYTTPGTPLIVQGTELPMYGGDEEESQRLVPFNSGDPELKEFHTRIASLRNEFPALRQGDIELVDTVDSMIVYKRSYEGQTMYVAINNGSESAYVDVTDVDANKELRGHLQDNLVRENQEGNHRIGIPRESVEVYEVQDDHGLNWWFIGFIVMVILAFIAGVIYLTIKQRKREKK

SEQ ID NO: 89 - DNA, 1752 bp, Oceanobacillus iheyensis HTE831
  CDS (1)..(1752): transl_table=11
atgctaaaagaagcagtatttcatcgaccaaagaataattatgcttacctttacaaagagaatacgttacacattcgtttacaaacaaagaaagatgatgtagtaaaagccacacttatctatgcagatccttataattgggatgattcaggatggatttataacaaggcagacatgcgtctcatagcttccgatcagctattcgattattggcaaattgaaatttattgtaaaacacgtcgaataagatatggatttcaattatctgatactaaagaaactcttatttatacagagaaaggattttataaagaaattccaaatgatgacactgcttattacttctgcttcccttttttaaacccaatagatcaatttcaagcaccagaatgggtaaaggaaactgtatggtatcaaatttttcctgaacgatttgcgaacggaaatgaaacaattaatcctcctggaactttaccttggggaagcactacccctacacctacagatttttttggtggtgactttcaaggtataatcaatcacttggattatcttgtagatttaggtatttccggtatttattttacgcctatatttaaagcattttctaaccataaatacgatacgattgactatatggaaatcgatcctcaatttggggataaacagacatttcgaaagttagttaaagcttgtcatcaacgaggaattcgcattatgcttgatgctgtatttaatcatagtggctatttctttgaaccatttcaggatgtgttaaaaaaccaagagaagtctatttataaggaatggtttcatatcgagagttttcctttgagaacagacccagcaccaaactatgacacctttgcatatgtaggttcaatgccaaaactaaatacagagcacccggaagtgaaatcatatttacttaaagtagcatcatattggattgaagagtttgatatcgatgggtggcgattagacgtagctaatgaagtggatcaccaattttggagagatttccgtagacaagtgaaatccataaagccagatgtctatattctcggagaaatatggcatgattcgatgccctggttacaaggagatcaatttgacgcagtaatgaactatccacttaccagtgctgcacttgattttattgcaaaggaaaaaatagatgttaaagaatttgtccaacaaatttctaatgttctactttcttatccacagaacgtgaatgaagtagcatttaatctattaggcagtcatgatactcccagagttttaacacattgcaacaatcaagtcgaaaaagcaaaacttctatatatattattattaacgatgccaggttctccttgtatttattatggagatgaaattggaatgactggagaaggggatcctggttgcagagaatgtatggtttgggacgagaatgaacaaaatgtagaattaaaatctttccttaaaaaattaattcatgtgcggaaaacggaaaaggctgttgcaaatcaaggagaattttcatttgtaaaaactagtgataattatttcatttataaactttttcaacagcatatggaaatttatattattataaacccaagtaatcaggctctcgaagtatcacttccggtaaccaagtggaacagtgccttcgatttatgggaggaagatgatttcaatattaacactccaataaaatgtgaggaaaatagtttcaaaataatcaaagtaaattattcataa

SEQ ID NO: 90 - protein, 583 aa, Oceanobacillus iheyensis HTE831
MLKEAVFHRPKNNYAYLYKENTLHIRLQTKKDDVVKATLIYADPYNWDDSGWIYNKADMRLIASDQLFDYWQIEIYCKTRRIRYGFQLSDTKETLIYTEKGFYKEIPNDDTAYYFCFPFLNPIDQFQAPEWVKETVWYQIFPERFANGNETINPPGTLPWGSTTPTPTDFFGGDFQGIINHLDYLVDLGISGIYFTPIFKAFSNHKYDTIDYMEIDPQFGDKQTFRKLVKACHQRGIRIMLDAVFNHSGYFFEPFQDVLKNQEKSIYKEWFHIESFPLRTDPAPNYDTFAYVGSMPKLNTEHPEVKSYLLKVASYWIEEFDIDGWRLDVANEVDHQFWRDFRRQVKSIKPDVYILGEIWHDSMPWLQGDQFDAVMNYPLTSAALDFIAKEKIDVKEFVQQISNVLLSYPQNVNEVAFNLLGSHDTPRVLTHCNNQVEKAKLLYILLLTMPGSPCIYYGDEIGMTGEGDPGCRECMVWDENEQNVELKSFLKKLIHVRKTEKAVANQGEFSFVKTSDNYFIYKLFQQHMEIYIIINPSNQALEVSLPVTKWNSAFDLWEEDDFNINTPIKCEENSFKIIKVNYS

SEQ ID NO: 91 - DNA, 1398 bp, Bifidobacterium longum NCC2705
  CDS (1)..(1398): transl_table=11
gtgagcttggccacatgttcacggactgcgtttcatgccgattacccgggattcgcaccgcgatgtgcgaaaatggacacggtatcaatcaggaggtgcacagtggttgtaagcacggattcgagccgcacaatgcccgattgggtgaagtacggggtgttctggcacgtgtatccgctgggcttctgcggtgccgatatcaggcccgccggcccgcgccggttccatggccgcggccttgacgcgataattccctggctggagtacgtgcgcgatctaggcgcgtccggcctgctgctgggtccggtgttcgagtcggcgacgcatggatacgacacgctcgaccatatgcatatcgatgtgcgattgggcggggatgccgcgttcgatcagcttgtcgcggcctgccgggacatgggattgcaggtgatgctggatggcgtgttcaatcacgtgagccgcaatcatccggccgttcaggcggcgcttgacgagaccgccggacgcttgaatccggccgacaacccgtggcatggtctggtccgcgcgcatgtcggtgataatggcgaacccgctttggatgtgttcgaggggcacggggatctggtggcgctggaccattcggctgacgagaccgttgactatgtggtccatgtgatgagccattggctggatcgcggagccgccggctggcgcctcgacgccgcgtatgccgtgccgagcccgttctgggcgcgcgtgttgccgcaggtcaaagccgcacacccgtattcgtggattttcggcgaggtgatccatggcgattacccgcgcatcatcgaggaatccacgatggattcgatcacgcaatacgagctatggaagtcgatccagcatgcgctggagacggagaacttcttcgagctggattggaacttgaagcggcacaacgcgttcctggattccttcgtgccgcagacgttcatcggcaaccatgacgtgacgcgtatcgcatcgcagattggcccggccaaggcggcgttggcattggcggtgctcatgacggtcggcggcgtgccaagcatctattacggcgacgaacagggctatgtgggcgtcaagcaggagcgtttcggcggcgatgacgacgtacgtccgaagttccccggctcccctgccgaactgtccacgctgggagagccgacataccggctgcatcaggcgctgatcgcgctgcgccgtcgcaacccatggctgctggatgcgcgtaccgaggccgtgaagctggaaaacaagcacttcgtctatcgttcgacgagcgccgacgcccagcattccctgaccgtggacctcaacatcgagcaatcccccactttcaccatccgcaacgccgatggcagtacagcgtatcaatggtga

SEQ ID NO: 92 - protein, 465 aa, Bifidobacterium longum NCC2705
MSLATCSRTAFHADYPGFAPRCAKMDTVSIRRCTVVVSTDSSRTMPDWVKYGVFWHVYPLGFCGADIRPAGPRRFHGRGLDAIIPWLEYVRDLGASGLLLGPVFESATHGYDTLDHMHIDVRLGGDAAFDQLVAACRDMGLQVMLDGVFNHVSRNHPAVQAALDETAGRLNPADNPWHGLVRAHVGDNGEPALDVFEGHGDLVALDHSADETVDYVVHVMSHWLDRGAAGWRLDAAYAVPSPFWARVLPQVKAAHPYSWIFGEVIHGDYPRIIEESTMDSITQYELWKSIQHALETENFFELDWNLKRHNAFLDSFVPQTFIGNHDVTRIASQIGPAKAALALAVLMTVGGVPSIYYGDEQGYVGVKQERFGGDDDVRPKFPGSPAELSTLGEPTYRLHQALIALRRRNPWLLDARTEAVKLENKHFVYRSTSADAQHSLTVDLNIEQSPTFTIRNADGSTAYQW

SEQ ID NO: 93 - DNA, 1818 bp, Shigella flexneri 2a str. 301
  CDS (1)..(1818): transl_table=11
atgatgttaaatgcatggcacctgccggtgcccccatttgttaaacaaagcaaagatcaactgctcattacactgtggctgacgggcgaagacccaccgcagcgcattatgctgcgtacagaacacgataacgaagaaatgtcagtaccaatgcataagcagcgcagtcagccgcagccaggcgtcaccgcatggcgtgcggcgattgatctctccagcggacaaccccggcggcgttacagtttcaaactgctgtggcacgatcgccagcgttggtttacaccgcagggcttcagccgaatgccgccggcacgactggagcagtttgccgtcgatgtacctgatatcggcccacaatgggctgcggatcagattttttatcagatcttccctgatcgttttgcgcgtagtcttcctcgtgaagctgaacaggatcatgtctattaccatcatgcagccggacaagagatcatcttgcgtgactgggatgaaccggtcacggcgcaggcgggcggatcaacgttctatggcggcgatctggacgggataagcgaaaaactgccgtatctgaaaaagcttggcgtgacagcgctgtatctcaatccggtgtttaaagctcccagcgtacataaatacgataccgaggattatcgccatgtcgatccgcagtttggcggtgatggggcgttgctgcgtttgcgacacaatacgcagcagctgggaatgcggctggtgctggacggcgtgtttaaccacagtggcgattcccatgcctggtttgacaggcacaatcttggcacggggggagcttgtcacaactctgaatcgccctggcgcgactggtactcgtttagtgatgatggcacggcgctcgactggcttggctatgccagcttgacgaagctggattatcagtcggaaagtctggtgaatgaaatttatcgcggggaagacagtattgtccgccactggctgaaagcgccgtggaatatggacggctggcggctggatgtggtgcatatgctgggggaggcgggtggggcgcgcaataatatgcagcacgttgcagggatcaccgaagcggcgaaagaaacccagccggaagcgtatattgtcggcgaacattttggcgatgcacggcaatggttacaggccgatgtggaagatgctgccatgaactatcgtggcttcacattcccgttgtggggatttcttgccaataccgacatctcttatgatccgcagcaaattgacgcccaaacctgtatggcctggatggataattaccgcgcagggctttctcatcaacaacaattacgtatgtttaatcagctcgatagccacgatactgcgcgatttaaaacgctgctcggtcgggatattgcgcgcctgccgctggcggtggtctggctgttcacctggcctggtgtaccgtgcatttattacggtgatgaagtgggactggatggtaaaaacgatccgttttgccgtaaaccgttcccctggcaggtggaaaagcaggatacggcgttattcgcgctgtaccggcgaatgattgtgctgcgtaagaaaagtcaggcgctgcgtcgtggcggctgtcaggtgctgtatgcggaagataacgtagtggtatttgtccgcgtgctgaatcagcaacgtgtactggtggcaatcaaccgtggcgaggccagtgaagtggtgctacccgcgtcaccgtttctcaatgccgtgcaatggcaatgcaaagaagggcatgggcaactgactgacgggattctggctttgcctgccatttcggctacggtatggatgaactaa

SEQ ID NO: 94 - protein, 605 aa, Shigella flexneri 2a str. 301
MMLNAWHLPVPPFVKQSKDQLLITLWLTGEDPPQRIMLRTEHDNEEMSVPMHKQRSQPQPGVTAWRAAIDLSSGQPRRRYSFKLLWHDRQRWFTPQGFSRMPPARLEQFAVDVPDIGPQWAADQIFYQIFPDRFARSLPREAEQDHVYYHHAAGQEIILRDWDEPVTAQAGGSTFYGGDLDGISEKLPYLKKLGVTALYLNPVFKAPSVHKYDTEDYRHVDPQFGGDGALLRLRHNTQQLGMRLVLDGVFNHSGDSHAWFDRHNLGTGGACHNSESPWRDWYSFSDDGTALDWLGYASLTKLDYQSESLVNEIYRGEDSIVRHWLKAPWNMDGWRLDVVHMLGEAGGARNNMQHVAGITEAAKETQPEAYIVGEHFGDARQWLQADVEDAAMNYRGFTFPLWGFLANTDISYDPQQIDAQTCMAWMDNYRAGLSHQQQLRMFNQLDSHDTARFKTLLGRDIARLPLAVVWLFTWPGVPCIYYGDEVGLDGKNDPFCRKPFPWQVEKQDTALFALYRRMIVLRKKSQALRRGGCQVLYAEDNVVVFVRVLNQQRVLVAINRGEASEVVLPASPFLNAVQWQCKEGHGQLTDGILALPAISATVWMN

SEQ ID NO: 95 - DNA, 1746 bp, Leptospira interrogans serovar Lai str. 56601
  CDS (1)..(1746): transl_table=11
ttgttggaatacagccttgacagtcttcattcttatatttttgattccattaaagctcgagtaaatatgacttctaaaaaatcaacttccaaaaaaaaatcacccaatcaattggataagtggtggcaaaaaacaacgatttaccagatttatccccgctcttttgcagatagtaatcgggatggtgttggagacattccagggatcatttctaaattggattatcttcaagatcttgggtttgaaacaatttggatatctcctttgtataaaagtccacaaatggatcacggttacgatgtaagtgattattactcgatcgctccagaatatggaactataaaagatgcagaaaagttaataaaggaagttcataagcgcgggatgaaaatcgtttttgatatggtgatgaatcatacttctattgaacacgattggtttatacaatcccgttctagtcgagataatcctaaaagagattggtatatttggaaagacggaagaggaaaaaataaacctcctaataattggagttcgtttgtgacacccaaggcctggcattatgattccaatacggatcaatggtatcttgcgagttttctagattttcaaccagacttaaattattacaatccagaagtcaaaaaggcaatgttcgacgttttgcgtttttggcttaagaagggagtagatggtttccgtttggatatttttcacgcgatttataaggataaatatttcagagacaatccgtttcgatttaaatatatcgtttcggaaaatgatcacgatggttattttcagagtagggttcatactgtaaaccatccaaataactttgcttttgcgaaagagctaagatccgttttagatgagtttgatggagatcgttttgcggtaggagaggtggccggagatgatcatatcatcaaacgctacttaggcgaaaaaaaagatggcctgaatctaatctttttattcgaaactttgttgttaaagttcaagactagtttttttaagggaatcgtaaaaaaaatggaacaagtatatccgtatccaaacgttcccacatacgtttttggaaaccatgaccaaagacgttacatgatgaaaatcaataataatctcgaaaaaggaaaattgattgctctgtttcagtttaccgcgaggggggttccagtcacttattacggagaagaaattggaatgaccaatgagacgatcaaattaactgaggcacaggatccgcttgcaagaatctatcgctggttaggtgattcgctttccgaattgttgggactcgcagacgttatcattcgggatcgagcaaggtcgccgatgcaatgggacgactcgccaaacgcaggttttacggttcaagaagcaaaaccatggattcgggttcacggaaattatagagaacgtaacgttttgatcgagtccgaagattcggattctcttttaaatacttataaaagtgttcttcgcattcgaaatggaagttttgctcttaaagagggttctttgagattaattgaagaaaacgttccaaaagatatgttagtttatttaagggaatttggtaaggaacgtaaactgatcgtttttaattttggtaaaaaaaccaaatttttttctaatcctaccgattgtagaaaatattttttctctacggtttctttcgatcataacgaatttgatcaatttaaaatacctccttgttctggagttatattaggtaattag

SEQ ID NO: 96 - protein, 581 aa, Leptospira interrogans serovar Lai str. 56601
MLEYSLDSLHSYIFDSIKARVNMTSKKSTSKKKSPNQLDKWWQKTTIYQIYPRSFADSNRDGVGDIPGIISKLDYLQDLGFETIWISPLYKSPQMDHGYDVSDYYSIAPEYGTIKDAEKLIKEVHKRGMKIVFDMVMNHTSIEHDWFIQSRSSRDNPKRDWYIWKDGRGKNKPPNNWSSFVTPKAWHYDSNTDQWYLASFLDFQPDLNYYNPEVKKAMFDVLRFWLKKGVDGFRLDIFHAIYKDKYFRDNPFRFKYIVSENDHDGYFQSRVHTVNHPNNFAFAKELRSVLDEFDGDRFAVGEVAGDDHIIKRYLGEKKDGLNLIFLFETLLLKFKTSFFKGIVKKMEQVYPYPNVPTYVFGNHDQRRYMMKINNNLEKGKLIALFQFTARGVPVTYYGEEIGMTNETIKLTEAQDPLARIYRWLGDSLSELLGLADVIIRDRARSPMQWDDSPNAGFTVQEAKPWIRVHGNYRERNVLIESEDSDSLLNTYKSVLRIRNGSFALKEGSLRLIEENVPKDMLVYLREFGKERKLIVFNFGKKTKFFSNPTDCRKYFFSTVSFDHNEFDQFKIPPCSGVILGN

SEQ ID NO: 97 - DNA, 1839 bp, Corynebacterium efficiens YS-314
  CDS (1)..(1839): transl_table=11
atgcagggtcgacgagacgtggaaaatgtctctacccttgtgggtatgactgacactaccccgttgagttcggacctgatcccagagagcaccgcccgcccggtagtcgatgccgagggcttcatcattgagcatgagtcggaggagtaccacactcccacccccgcccccggtgaacagccctgggagaaacatgaccgcgaatggtacaaggacgctgtgttctatgaggtgctggtgcgtgccttctacgacccggacaacaccggttcgggcaccctgaagggtctgacggagaagctggattacatccagtggctgggtgtggactgcatctgggtgccgcccttctacgactctcccctgcgtgatggtgggtatgacatccggaacttccgtgagatcctgccggagttcggcacggtggaggatttcgtggagctggttgaccaggcccaccgccgtggtctgcgtgtgatcaccgacctggtgatgaaccacacctccgatcagcatccgtggttccagcagtcccggacggatccggatggcccctatggtgacttctacgtctggggggatgatccggagatgtacaaggaagcccgcatcatcttcgtcgataccgaggaatccaactggacctacgacccggtgcgcaagcagtactactggcaccggttcttctcccaccagccggacctgaactatgacaacccggcggtgcaggaggcgatgctcgatgtgctgcggttctggctggatctgggtctggatgggttccgtctggatgccgtgccctacctgttcgagcgtgagggtaccaacggtgagaacctgccggagacccacgagtttctcaagcggtgccgtcgggtgatcgatgaggagtacccgggccgcatcgtcctggcggaggccaaccagtggccccatgatgtggtggagtacttcggtgagaaggagaagggcgatgagtgccacatggccttccacttcccgctcatgccccgcatcttcatgggtgtgcgccaggggtcccgcaccccggtcagtgagatcctcgagcacaccccggacatccccaagaccgcccagtggggtatcttcctgcgcaaccatgacgagctgaccctcgagatggtgtccgaagaggaacgcgcctacatgtaccagcagttcgcccccgagcctcggatgcgcgcgaacgtgggtatcaggcgtcgactagcaacgcttgtcgacggcgaccgcaaccagctcgaactcctgcacgggctgttgctgtccctcccgggttcccccgtgctgtactacggcgatgagatcggcatgggcgacaacatctggctgccggaccgtgatggcgtgcgcacccccatgcagtggtccaatgaccgcaacgggggtttctccaaggcagatcccgagcgtctttatctgccagcgatccagaatgaccgcttcggttatgcccaggtcaatgtggaaacccagctcaagcaggagaactccctgctgcagtggatccgcaaccagatcatgatccgcaagcagtacaaggccttcggcaagggcacctaccgggagatcgactccaccaacgaggcggtgctgaccttcctccgtgagtacaaaggccagaccattctgtgtgtcaacaacatgtcgaagctgccacaggcggtggccctggatctcagcgagttcgccggcatcaccccgcgtgaggtctccggcggccagtacttccccaccatcggtgagcgccagtgtgtgttcaccctggcaccgcatgggttcttctggctcgatctcaccggtgaggaggaggaatga

SEQ ID NO: 98 - protein, 612 aa, Corynebacterium efficiens YS-314
MQGRRDVENVSTLVGMTDTTPLSSDLIPESTARPVVDAEGFIIEHESEEYHTPTPAPGEQPWEKHDREWYKDAVFYEVLVRAFYDPDNTGSGTLKGLTEKLDYIQWLGVDCIWVPPFYDSPLRDGGYDIRNFREILPEFGTVEDFVELVDQAHRRGLRVITDLVMNHTSDQHPWFQQSRTDPDGPYGDFYVWGDDPEMYKEARIIFVDTEESNWTYDPVRKQYYWHRFFSHQPDLNYDNPAVQEAMLDVLRFWLDLGLDGFRLDAVPYLFEREGTNGENLPETHEFLKRCRRVIDEEYPGRIVLAEANQWPHDVVEYFGEKEKGDECHMAFHFPLMPRIFMGVRQGSRTPVSEILEHTPDIPKTAQWGIFLRNHDELTLEMVSEEERAYMYQQFAPEPRMRANVGIRRRLATLVDGDRNQLELLHGLLLSLPGSPVLYYGDEIGMGDNIWLPDRDGVRTPMQWSNDRNGGFSKADPERLYLPAIQNDRFGYAQVNVETQLKQENSLLQWIRNQIMIRKQYKAFGKGTYREIDSTNEAVLTFLREYKGQTILCVNNMSKLPQAVALDLSEFAGITPREVSGGQYFPTIGERQCVFTLAPHGFFWLDLTGEEEE

SEQ ID NO: 99 - DNA, 1839 bp, Vibrio vulnificus CMCP6
  CDS (1)..(1839): transl_table=11
atgaccctaccttttctttttcatgcgcaaacgccggattatttccgcgttgagaatcaaatcgctcacgttaccttaagaactcagcctgaaggaattcaagccgtctacctgcggcacgagcctgacaatgaagagtacttagtagaaatgcagcgagtctctaagttaggggaactcgatggctggcaagcgtcattccctttgaataaagaccgagagatcacccagtacgttttcaaagtgatcacagaaggtgccactgtctggttagacgctcgtggcgtacagaaacggatgccaggcagcgagtaccatttcaaatacaaccaatctcatcagccgccagagtgggtgagtgagcagattttctaccaaattttccctgatcgattctgtaatggtaacccagagatcagcgttaaaagtggcgaatactcggtaaaaaatggcacacgccctgtggtcgcaaaagagtggggagcggccgttgacaaacacaatggctatgggggttgtgagttttatggcggggacttggctggcattcgcagcaaattggattacctgcaaaccttgggcgtgacagcgctctatctcaatccgattttttcggcgccgagcaatcacaagtacgacaccactgattacttaaccattgatccgcatttgggaagcaatcaagagtttgcagagttgagcgaagcgcttcatcaacgcggtatgaaaattgtgcttgatgccgttttcaatcacacctcatgtgagcacccttggtttgacaaaaatggggtaggtgagataggggcctatcaccacatcgaatcgccttatcgccactattattttttcgaagacggtagccaaaattatattggctggaagggcgttgacagtttaccagtactgaattttgaaaatgcggaggtacgtaattacatttatgccagcgaacacgcggccattcgccactggttgaaagcaccctatcgaatcgatggttggcgttttgacgtgatccacatgcttggagaaggtgaaggggcgcgcaacaatgcctactatgttaagcagttccgcaatgcgactaaacaagaaaaccctcaagcttatgtattaggggagcatttcttcgaggcgagcaagtggctccaaggcgatcaagaagacggctcgatgaattactacggctttgcccatccagtgagagcattattggcccaaaaagacattgcctaccatcctattgagatcgactgcatcgattttgttgattggctaaatgaatcacgcgctaaagtaccttggcttaaccagctcagccagttcaatcaacttgacagccacgataccgcacgttttattaccttgttggaaaatgaccaagcgcgcatgaacattgctctcggcttgctgttcacttatgtcggaaccccttgtatctattatggtagtgaagttggactggaaggtgagaatgacccagataaccgccgctgtttcccgtgggagcgtgttggtcatgtggagacgttccaatatcaccaacgtctcattgaacttcgcaaaacgtctaaggcgctgcagcaagggtcgatccaatttttgcatgttgagccaacgtcgttcagttttgctcgtcagtatggtgaagacactctgcttgtgatggtcaacttagattcgaaggcatgctctatgacgctgccaatttggcaacttggaaagccgcaaggacgtctggtttccctattgggtaatgaaagtgctttgcaagtaaatagtaaagttgtggttaatatctcttctgaatccattcaaatttggaaacttgagtga

SEQ ID NO: 100 - protein, 612 aa, Vibrio vulnificus CMCP6
MTLPFLFHAQTPDYFRVENQIAHVTLRTQPEGIQAVYLRHEPDNEEYLVEMQRVSKLGELDGWQASFPLNKDREITQYVFKVITEGATVWLDARGVQKRMPGSEYHFKYNQSHQPPEWVSEQIFYQIFPDRFCNGNPEISVKSGEYSVKNGTRPVVAKEWGAAVDKHNGYGGCEFYGGDLAGIRSKLDYLQTLGVTALYLNPIFSAPSNHKYDTTDYLTIDPHLGSNQEFAELSEALHQRGMKIVLDAVFNHTSCEHPWFDKNGVGEIGAYHHIESPYRHYYFFEDGSQNYIGWKGVDSLPVLNFENAEVRNYIYASEHAAIRHWLKAPYRIDGWRFDVIHMLGEGEGARNNAYYVKQFRNATKQENPQAYVLGEHFFEASKWLQGDQEDGSMNYYGFAHPVRALLAQKDIAYHPIEIDCIDFVDWLNESRAKVPWLNQLSQFNQLDSHDTARFITLLENDQARMNIALGLLFTYVGTPCIYYGSEVGLEGENDPDNRRCFPWERVGHVETFQYHQRLIELRKTSKALQQGSIQFLHVEPTSFSFARQYGEDTLLVMVNLDSKACSMTLPIWQLGKPQGRLVSLLGNESALQVNSKVVVNISSESIQIWKLE

SEQ ID NO: 101 - DNA, 2064 bp, Vibrio vulnificus CMCP6
  CDS (1)..(2064): transl_table=11
atgaaactgaacgccataaccctaactctgcttctcagctcgacagcggcgattgccgagccgaatttaaccatttcaaccaccaccaacagccgagattttccgctcagtgccgagcagccattagtggtgccgctggtcaaagagagctatcaactgaaaatcactgggctggaaggtgattgccaagcgccagatgcgcaggtgattaagttcaatcaacccattgcgctgaattgtggcaaagtgaccgaacttccgcttaaaatccgctttacgggtgactacagctttgaactagacgcgaacgccaacacgctgacattcaaacgtgagccgaaaaaggtcgctaaaaccgaattcaaacgcccattgccgcaggtgacttgtgaagtttaccaaggcggtgaagtgacgattgaactgggcgacagtttcaaagacggcacctcactgcgtgacgcctacagcggccaagtggtgagcgtgaaaaaaggcaaagtgagcttaacgccatcagcgcaatctggcggtttggtgctgctggaaccggttaaacaaaacaaaaaagcgcgccctttcgattaccgcaacgccaatatttacttcgtgatggtggatcgctttaacaatggcgacaccagcaatgaccaaagttatggtcgtcagaaggatggtaaagaggaaatcggcaccttccacgggggcgatcttaaaggggtgattgaaaagctcgactacattcaacgtctcggcactgatgcgatttggttgtcgccgattgtggagcaagtgcacggttttgttggtggtggcgacagcggctctttcccattttatgcctatcacggctattggacgcgtgattttaccaagatcgatgagaactttggccgcgatgaagatttgaaaactctggtggaagaggcgcataaacgcggcatcaaagtcctgctcgatgcggtgatcaaccattccgggtattcaacactggcggatctgcaatttgatggcatgcaagtgacgacaaaagaagcgaacttgccagaaaaatgggccaactggcagccaacatcgggtgaaaactggcatagctaccactctgcgatcgactatcaaagccaaaactggtcacagtggtggggggcagattgggtgcgaactgggcttccgggttaccaacaaccgggcagcagcgacattactttgtctctcgctgggttgcctgattttcgcaccgagtcgacccaagcggtgacgccaccacagtggctgctagagaaccccggtacgcgcgtggtggcgcgtgacaactacaccgtcagcgactatttgattgagtggcaaaccgattgggtgaaacgctttggtattgacggctatcgggtagatacggtcaaacacgttgaaggcgaagtgtggaagcgcctgaaacaagaagcgacgaaaagcctcgatgcgtggcgcaaagccaatggccaatcgggtgcgccattttggatgatgggggaagtgtggggccactcagcctaccgcagcccttattttgacgacggttttgatgcgctgatcaacttcgatatgcagaagaaactcgataaaggcgcagcctgttttagccaaatggccgatacctatcgcgattacgccaacaccatcgcgcagcagagtgattttaatccagtgagctacatgtcctcgcacgatactgagctgttctttagccgatttaaagactatgccgtgcagcgcaacgccgcgaacgcattgctgctcagccctggtgcggtgcagatttactatggtgatgaagtagggcgcaatattggcccatacgcggatgatttccatcaaggcactcgctcggacatggtatggcaattgagcgcagagcaacaaacattgctcaatcattggcagaaactgggccagttccgccgggcgcatcccgcgattggcgctggtgtgcatcaggagattgaacaaactggcgcgtacgttttctcccgcaccttaggggatgacaaagtggttgtggcgtttgttggtcacgccgtgcaatag

SEQ ID NO: 102 - protein, 687 aa, Vibrio vulnificus CMCP6
MKLNAITLTLLLSSTAAIAEPNLTISTTTNSRDFPLSAEQPLVVPLVKESYQLKITGLEGDCQAPDAQVIKFNQPIALNCGKVTELPLKIRFTGDYSFELDANANTLTFKREPKKVAKTEFKRPLPQVTCEVYQGGEVTIELGDSFKDGTSLRDAYSGQVVSVKKGKVSLTPSAQSGGLVLLEPVKQNKKARPFDYRNANIYFVMVDRFNNGDTSNDQSYGRQKDGKEEIGTFHGGDLKGVIEKLDYIQRLGTDAIWLSPIVEQVHGFVGGGDSGSFPFYAYHGYWTRDFTKIDENFGRDEDLKTLVEEAHKRGIKVLLDAVINHSGYSTLADLQFDGMQVTTKEANLPEKWANWQPTSGENWHSYHSAIDYQSQNWSQWWGADWVRTGLPGYQQPGSSDITLSLAGLPDFRTESTQAVTPPQWLLENPGTRVVARDNYTVSDYLIEWQTDWVKRFGIDGYRVDTVKHVEGEVWKRLKQEATKSLDAWRKANGQSGAPFWMMGEVWGHSAYRSPYFDDGFDALINFDMQKKLDKGAACFSQMADTYRDYANTIAQQSDFNPVSYMSSHDTELFFSRFKDYAVQRNAANALLLSPGAVQIYYGDEVGRNIGPYADDFHQGTRSDMVWQLSAEQQTLLNHWQKLGQFRRAHPAIGAGVHQEIEQTGAYVFSRTLGDDKVVVAFVGHAVQ

SEQ ID NO: 103 - DNA, 1464 bp, Bradyrhizobium japonicum USDA 110
  CDS (1)..(1464)
atggcacagggcgaggtgaattggtggcgcgacggcatcttctaccaggtctatccgcgctcgtttcaggacagcgacggtgacggcgtcggcgatctcgccggcatcttgcggcggctgccttatgtgaagtcgctcggcgtcgacgcgatctggctgtcgccgatcttcccctcgccgatggccgatttcggctacgacatttccgaccataccggcatcgatccgctgttcggcacgatggcggatttcgacgcgctgctcacggccgcgcatgagcatggtctcaagctgatcctcgacctcgtgcccaaccacacctcggaccagcatccctggtttgtcgagagccggtcctcgcgcgacaatcccaagcgcgactggtacgtctggcgcgatccggcgcccgatggcggcgtgccgaacaactggctgtccgagttcggcggcagcgcgtggcagttcgacgagacgacgggtcaatattactatcacgccttcctcgcccagcagccggacctcaactggcgcaacccggacgtccgcgcggcgatctacgacgcgatgcggttctggctggacaagggcgtcgacggctttcgcgtcgacgtgatctggcacctgatcaaggacgccgaattccgcgacaatccgctcaatcctcactacgtcgagggccgtccgccgaacgagaagatcctgacgcaatattccaccgaccagccgccgttcaacttcgcgctgctctcgacgttctggagcgcgcgctcgatcgagacgatcatcgacgactacgagaaggcgctgccgaaaggcgcctggccgaactgggtgctcggcaatcacgaccgcccgcgggtcgccagccgtgtcgggcccgagcaggcccgcgtcgccgccatgctgctgctgacgctgcgcggcacgccgacgctctattacggcgacgagatcggcatgcatcagctcgcgatcgcgcccgaggacgtgcgcgatcccttcgagaagaacgtgcccggcatcggcgtcggccgcgacggttgccgcacgccgatgcagtgggattcctcgaacttcgccggcttctcgaacgtcaggccgtggctgccgctgcctgaggatcatatccacgagaatgtcgtcaatctcgaagccgacacgcgctcgatcctcagcctgtacaggcggctcatcgtgctgcgaaagagcagcccgcccctggtggccggcaactatcatccgatcgctgcgcagggcgatctcctgatctaccgccgcgaggccgagggcagggcggtgatcgtggccctcaatctcggccccgacccgatcgccgtcaccaccagcgcgatccgcttcggcagcgagatcctgctgtcgacgttcctggatcgtgagggtgagcggctggaaggggtgctggatctgcgcgggaatgaaggggtgatcgtgcagccgccctaa

SEQ ID NO: 104 - protein, 487 aa, Bradyrhizobium japonicum USDA 110
MAQGEVNWWRDGIFYQVYPRSFQDSDGDGVGDLAGILRRLPYVKSLGVDAIWLSPIFPSPMADFGYDISDHTGIDPLFGTMADFDALLTAAHEHGLKLILDLVPNHTSDQHPWFVESRSSRDNPKRDWYVWRDPAPDGGVPNNWLSEFGGSAWQFDETTGQYYYHAFLAQQPDLNWRNPDVRAAIYDAMRFWLDKGVDGFRVDVIWHLIKDAEFRDNPLNPHYVEGRPPNEKILTQYSTDQPPFNFALLSTFWSARSIETIIDDYEKALPKGAWPNWVLGNHDRPRVASRVGPEQARVAAMLLLTLRGTPTLYYGDEIGMHQLAIAPEDVRDPFEKNVPGIGVGRDGCRTPMQWDSSNFAGFSNVRPWLPLPEDHIHENVVNLEADTRSILSLYRRLIVLRKSSPPLVAGNYHPIAAQGDLLIYRREAEGRAVIVALNLGPDPIAVTTSAIRFGSEILLSTFLDREGERLEGVLDLRGNEGVIVQPP

SEQ ID NO: 105 - DNA, 1698 bp, Bradyrhizobium japonicum USDA 110
  CDS (1)..(1698)
atgatcgacgatctctggtacaagaacggcgtgatctactgcctgtccgtcggcacctatatggatgccgacggcgacggcgtcggcgacttcaagggcctgctgcggcggctcgactatctgcacggcctcggcatcaccacgatctggctgatgccattccagacctcgcccggccgcgacgacggctacgacatcgccgactattacagcgtcgattcccgctacggcacgctcggcgacttcgtcgaattcgcccatggctgcaagcagcgcggcatccgcatcatcatcgacctcgtcgtcaaccacacctcggaccagcatcgctggttcaaggacgcgcggcgcgacaagaactcgccctatcgcgactggtacgtctggtccgacacgaagcccgccaatgccaacaagggcatggtgtttcccggcgtgcagaaatcgacctggacgcgcgacaaggacgccggcgcctggtattttcatcgcttctacgattttcagcccgacctcaacacctcgaacccgcacgtgcaggccgagatcttgaagatcatgggcttctggatccagctcggcgtctccggattccgcatggacgccgtgcccttcgtgatcgcgaccaagggcgccaaggtgaagaagccggtcgagcaatacgacatgctgcgcgcgttccgcgaattcctgcaatggcgccagggtgacgccatcatcctcgccgaagccaatgtgctgccggaaaccgacatggaatatttcggccgcgatgccgaccgcatgcacatgatgttcaacttccacgtcaaccagcatctgttctatgcgctggcgtcggccgactcgcgaccgctggcaaaggcgctgaaggcgaccaagccgcggccgggctcggcgcaatggggcctgttcctgcgcaatcacgacgagctcgatctcgggcgcttgaccccggcgcagcgcgacaccgtgttcaagagcttcggccccgacaaggacatgcagctctacgaccgcggcattcgccgccgcctcgcgccgatgctcggcggcgaccgcaggcggctcgagcttgcctacagcctgatgtgcacgctgccgggaacgcccgtgatccgctatggcgacgagatcgggatgggcgacgatctctcattgccggagcgcaattgcgcgcgcacgccgatgcaatggtcgaccgagccgcatggcggcttcaccaagaacgacaagccggcctgtcccgtcatcgacaagggcccttatggctttccgcacgtcaacgtcgccaagcagcggcgcgatgccaattccatgctgaactggaccgaacgcatcgtccgcatgcgcaaggaggtgccggagatcggctggggcgatttcgcggtcattgcgacgcgtgatccggccgtcttcatcatgcgctatgactggcgcaacaattcggtgctgttcgtgcacaatctcgatgagaagccacgcgagatcgcgttctcgacggggctgcctgatgatgccggcgcgcacctgatcaatctgctcgcggaagaccacagccacgccgacaagcgcggccagcaccgcgtcgtgctggagccgtatggctatcgctggtatcgggtcggcgggttggattatctcttgaagcggagcgatatcgacggggatactgcgggtaacaagcatccggggtag

SEQ ID NO: 106 - protein, 565 aa, Bradyrhizobium japonicum USDA 110
MIDDLWYKNGVIYCLSVGTYMDADGDGVGDFKGLLRRLDYLHGLGITTIWLMPFQTSPGRDDGYDIADYYSVDSRYGTLGDFVEFAHGCKQRGIRIIIDLVVNHTSDQHRWFKDARRDKNSPYRDWYVWSDTKPANANKGMVFPGVQKSTWTRDKDAGAWYFHRFYDFQPDLNTSNPHVQAEILKIMGFWIQLGVSGFRMDAVPFVIATKGAKVKKPVEQYDMLRAFREFLQWRQGDAIILAEANVLPETDMEYFGRDADRMHMMFNFHVNQHLFYALASADSRPLAKALKATKPRPGSAQWGLFLRNHDELDLGRLTPAQRDTVFKSFGPDKDMQLYDRGIRRRLAPMLGGDRRRLELAYSLMCTLPGTPVIRYGDEIGMGDDLSLPERNCARTPMQWSTEPHGGFTKNDKPACPVIDKGPYGFPHVNVAKQRRDANSMLNWTERIVRMRKEVPEIGWGDFAVIATRDPAVFIMRYDWRNNSVLFVHNLDEKPREIAFSTGLPDDAGAHLINLLAEDHSHADKRGQHRVVLEPYGYRWYRVGGLDYLLKRSDIDGDTAGNKHPG

SEQ ID NO: 107 - DNA, 1626 bp, Lactobacillus plantarum WCFS1
  CDS (1)..(1626): transl_table=11
atgcaagcacattggtggcaacgcgcaacggtttatcagatttacccacgtagctttcaagatagtaacggggatggaattggtgacatccctgggattatcagtcggctcgattacttggcaacccttggtgtggatgcgctgtggttaagcccggtatacaaaagtccgaatactgataacggctatgacattgcggattatcaggcgattgacccagcatatggcacgatggccgatatggatcagttgatcgctcaagcggctcagcgtggcataaaaatcgtgatggatttggtcgtgaatcataccagtgatgagcatctgtggtttgtggatgcttgtcagaatccagatagtccgacgcgcgattattatgtatgggcggatgctgttgatgggcatgcgcctaatgatctgacatctggtttcagtggcggttcagcttgggagctagatgaactaacgggccaatactttttgcacttgttttcaaaaaagcagattgatttgaattggcagaatccagacttacgacgcgcaatttatcgtatgatgaatttctggatcgataagggaatcgaagggtttcggatggacgtcatagatatgattgccaaggagccacgtgcaaaaattttagtgaatgggccgcatctgcatgaatatttacatgaaatgaatcgtcagacttggcggaaccgtgattttttaacagtcggtgaagcctggagtgcaagtccagaagatgcgcgacagtacagtgatgagcagcgcgaagaattaagtatggtcttccaattcggccacttatgggctgatcgccaggttggcggcgaaaagtgggaacagcgaccacttgatgttgcacaactgaaacaagcgctctatgcttgccaaacgacgatggcgactcacgggtggaatagtttattctggagtaaccatgacctgccccgcgccgtttcacgctttggggctacgggtcagtaccgagagctgagtgcgaagatgttagccattgctttacacggactaaaaggcacaccttttgtctatcaaggggaagagattggtatgactgattgcccagttgcaactatcgatcaagttaacgatgttgaagcccggacaatttatcgacaattacgagcacagggtgatgatgctggtaccgccatgcagaaaatcaatatctttaatcgtgataatgcgcggacgcccatgcaatggacggctaagcaacacgcgggatttacaacgggcaaaccatggttggcaatcaatgccaattatccgaggatcaatgttgcggccgcccaagcggactaccaatcgatatggtggacgtatcagcggctaattagattacgcaaacagtcggcggtgttgcaacagggtgagtttaccgagttatcagcggtaccggcaccaatcgttgcctacactcggacttggcaacaaacccaatggctaatttgcgctaattttgctgatacacttattacggtagatctaccaaagcgagcatctgagttaatcatcagtaactatcaagattatcctgagcaactggggcgggtggtattacgaccgtatgaagcgtttatccttgcattaagctag

SEQ ID NO: 108 - protein, 541 aa, Lactobacillus plantarum WCFS1
MQAHWWQRATVYQIYPRSFQDSNGDGIGDIPGIISRLDYLATLGVDALWLSPVYKSPNTDNGYDIADYQAIDPAYGTMADMDQLIAQAAQRGIKIVMDLVVNHTSDEHLWFVDACQNPDSPTRDYYVWADAVDGHAPNDLTSGFSGGSAWELDELTGQYFLHLFSKKQIDLNWQNPDLRRAIYRMMNFWIDKGIEGFRMDVIDMIAKEPRAKILVNGPHLHEYLHEMNRQTWRNRDFLTVGEAWSASPEDARQYSDEQREELSMVFQFGHLWADRQVGGEKWEQRPLDVAQLKQALYACQTTMATHGWNSLFWSNHDLPRAVSRFGATGQYRELSAKMLAIALHGLKGTPFVYQGEEIGMTDCPVATIDQVNDVEARTIYRQLRAQGDDAGTAMQKINIFNRDNARTPMQWTAKQHAGFTTGKPWLAINANYPRINVAAAQADYQSIWWTYQRLIRLRKQSAVLQQGEFTELSAVPAPIVAYTRTWQQTQWLICANFADTLITVDLPKRASELIISNYQDYPEQLGRVVLRPYEAFILALS

SEQ ID NO: 109 - DNA, 1827 bp, Vibrio parahaemolyticus RIMD 2210633
  CDS (1)..(1827): transl_table=11
atgtctttgccatttctctttcatagccagacggttgatggtttagccttcgatggtaaacgcgtgaaggtctgtctaaaaacagaagcgttaacatttgatgctgtttatgtgcgtattgagccagacaacgaagaataccttgtcgccatggtgcaatgcggtagagctggagagttactgctgtgggaagtatcgttcgagccgaatagagatcgagacatcacccactatgtatttaaagtcgttagaaatggtcagcaatattggctagacgcacgtggagtgcaaaaacgtattccgcccaaagaatttcatttcaaattgaatgtaaaccatcaaccgccaaagtgggttcaagaacaagttttctatcagatttttcctgatcgttttgccgcgagtcaaagtgagtctgcgattcgtgaagcgtactacgagtacgatcctgatgctgagattaaaatgtggggagaaccagtagggaatcaccaaaactctggggcacgtgagttcttcggtggtgatctaaaaggcgttgagcaaaagcttggataccttgaacaattgggtgtgaccgcactgtacttcaatccgattttttcctcgccaagtaaccataagtacgacaccacggattatttcacgattgatcctatgctcggcaccaacgagcattttgcgtcattgtgcgaaaaaatccgcagcaaaaacatgaagatcgtattggatgcggtctttaaccatacttctgtgcatcacccttggtttgatattcagcagaaagggaaaggcgcgtacgggaatcctaaatccgattttcgcgactattacttctttgatggggagagtaatcactatattggctggaaaggtatcgacaatctgccggtattgaattttgagaatcacgaagtcagagaatatatctaccaaggtgaggcgtcggttatcaaacattggctgaagccaccatattccgtggatggctggcgttttgatgtcattcatatgctaggtgaaggggagggggcgaaaaataatgctcactacgtgaaagcatttcgccaagcgaccaaatccgttaatccgaatgcttatgtgttaggtgagcatttttttgaggcgactcaatggttgcaaggggagcaagaagatggcgcgatgaactactacggttttgcccatcctgttcgagcgtttattgcgcatcaagacatcacgtacgacccaattgatatagatggttttgagttcaaagcgtggttggatgaagccagagcaaaagttccttttgccaatcagctctcacaactcaatcaacttgatagccatgacacggcgcgttttctcaccttggtgaatggggatgagaaaaaaatgaaaatcgcgttggccttactcatgacttatgtcggtgcgccatgcatttattatggtagtgaagtcggtcttgagggaagctttgacccagataacagacgttgtttcccttggcatttagttcagggttcgccttggctccacctgtaccaacagtggattgaaattcgcaaacagttccaagctctacaatctggcagcatgcaatggctgtattgtgacgaaagggcatttgcttatgcaagacagcttggtgaagagacgatcattgttgcagtcaatattggtctacaagaaagcacgattgacctaccattgtggcagttaggcttgaatgcgaaacacttgcatcaattattagataagtgtgaaataattgattatgaaggtcatgtttctgtcaatatggcagcattaagtatcaatttgtggcaagtgaagtga

SEQ ID NO: 110 - protein, 608 aa, Vibrio parahaemolyticus RIMD 2210633
MSLPFLFHSQTVDGLAFDGKRVKVCLKTEALTFDAVYVRIEPDNEEYLVAMVQCGRAGELLLWEVSFEPNRDRDITHYVFKVVRNGQQYWLDARGVQKRIPPKEFHFKLNVNHQPPKWVQEQVFYQIFPDRFAASQSESAIREAYYEYDPDAEIKMWGEPVGNHQNSGAREFFGGDLKGVEQKLGYLEQLGVTALYFNPIFSSPSNHKYDTTDYFTIDPMLGTNEHFASLCEKIRSKNMKIVLDAVFNHTSVHHPWFDIQQKGKGAYGNPKSDFRDYYFFDGESNHYIGWKGIDNLPVLNFENHEVREYIYQGEASVIKHWLKPPYSVDGWRFDVIHMLGEGEGAKNNAHYVKAFRQATKSVNPNAYVLGEHFFEATQWLQGEQEDGAMNYYGFAHPVRAFIAHQDITYDPIDIDGFEFKAWLDEARAKVPFANQLSQLNQLDSHDTARFLTLVNGDEKKMKIALALLMTYVGAPCIYYGSEVGLEGSFDPDNRRCFPWHLVQGSPWLHLYQQWIEIRKQFQALQSGSMQWLYCDERAFAYARQLGEETIIVAVNIGLQESTIDLPLWQLGLNAKHLHQLLDKCEIIDYEGHVSVNMAALSINLWQVK

SEQ ID NO: 111 - DNA, 1818 bp, Salmonella enterica subsp. enterica serovar Typhi Ty2
  CDS (1)..(1818): transl_table=11
atgttgaatgcctggcacttaccggttgccccgtttgttaagcaacataacgataaattaaccattacgctgtggctgagcggagaaaatccgccgtctcgcgtgacgttgcgctcagaattcgataacgaagaaatctcactggcgatgcgcaaacagcgccgccagccgcagccgggcgtgacggcgtggcgagcgacgctcaatatcgcgttagggcagccccgtcgccgttacagctttaaattgctttggcatgaccgccagcgatggtttacgccgcagggatttagctgctttccacccgcgcgtctggaacaatttgcggttgatgtgccggatagcggcccgcagtgggtcgccgatcaaattttttatcagatcttcccggatcgttttgcccgcagcgcgacgcgtgaagccgatcaggaccgagtgtattaccatcatgccgcgggtcaggagattgtgctgcgcgactgggacgatcctttaaccccccaggcgggcggttccaccttttacggcggctgtctgaatggcatttgtgagaagctgccgtatctgaaaaaactgggcgtcacagcgctatatctgaatccggtatttaccgcgccgagcgtccataagtacgacacggaagattatcgccatgtcgatccgcaatttggcggcgatcgggcgctgctacgcctgcggcgtgaaacgcaagcacagggcatgaggctggtgctggatggcgtgtttaaccatagcggcgactcgcatgcgtggtttgacaggcataaccgcagcactggcggcgcgtgccatcacccggactcgccgtggcgcgactggtactccttttcaccacaaggcgtggcgctggactggctgggttatccgagcctgccgaaactcgattatcaatcagaaacgctggtggatgagatctatcgcggtgaggacagtatcgttcgtcactggctaaaggcaccgtggaatatggacggctggcggctggatgtcgtacatatgctgggcgaggcgggcggggcgcgccacaatttgcagcacgtcgccggcattacccgggcggcaaaagaggcgcagcctgaagcctatattgtgggggaacatttcagcgatgcgcggcagtggctacaggccgatgcggaagatgccgccatgaattatcgcggcttcaccttcccgctgtggggatttctcgccaatactgatatcgcttacgaaccacagcatattgatgcccggacctgtatcgcgtggatggataactaccgcgccggattatcgcaccagcagcaactgcgcatgtttaatcaactcgacagccatgatactgcgcgctttaaaaccctgctgggtaaagacgcggcgcgcctgccgctggcggtggtctggctgtttacctggcccggcgtgccatgtatttattacggcgatgaagtcggcgtggacggcgcaaatgaccccatgtgccgcaaaccgttcccatgggatgaacgcaagcaggacggcaacttgctggcgctgtaccagcgtatggcgaaactgcgccagagcagtctggcgctgcgtcgtggcggatgccaggcgctgtatgccgaaggtgacgtagtggtattcgtgcgagtttatcagcagcagcgggcgctggtggcgattaaccggggcgaggcctgtgaagtggcgctggaagcgttgccgttgctgaacgtggccggatggcaatgtaaaacgggaagcggtgacatccgcgagggaagacttagtttacccgcgatttccgcgacggtatggatgaatcgttga

SEQ ID NO: 112 - protein, 605 aa, Salmonella enterica subsp. enterica serovar Typhi Ty2
MLNAWHLPVAPFVKQHNDKLTITLWLSGENPPSRVTLRSEFDNEEISLAMRKQRRQPQPGVTAWRATLNIALGQPRRRYSFKLLWHDRQRWFTPQGFSCFPPARLEQFAVDVPDSGPQWVADQIFYQIFPDRFARSATREADQDRVYYHHAAGQEIVLRDWDDPLTPQAGGSTFYGGCLNGICEKLPYLKKLGVTALYLNPVFTAPSVHKYDTEDYRHVDPQFGGDRALLRLRRETQAQGMRLVLDGVFNHSGDSHAWFDRHNRSTGGACHHPDSPWRDWYSFSPQGVALDWLGYPSLPKLDYQSETLVDEIYRGEDSIVRHWLKAPWNMDGWRLDVVHMLGEAGGARHNLQHVAGITRAAKEAQPEAYIVGEHFSDARQWLQADAEDAAMNYRGFTFPLWGFLANTDIAYEPQHIDARTCIAWMDNYRAGLSHQQQLRMFNQLDSHDTARFKTLLGKDAARLPLAVVWLFTWPGVPCIYYGDEVGVDGANDPMCRKPFPWDERKQDGNLLALYQRMAKLRQSSLALRRGGCQALYAEGDVVVFVRVYQQQRALVAINRGEACEVALEALPLLNVAGWQCKTGSGDIREGRLSLPAISATVWMNR

SEQ ID NO: 113 - DNA, 2079 bp, Bacteroides thetaiotaomicron VPI-5482
  CDS (1)..(2079): transl_table=11
atgaataaacatctccactttttatctcttttgtggttgtcaatgctcatggcattcatgaccgcttgcagcgatgacaaaaatatcaccgaccctgctccggaacccgaaccgcccgtcgaagggcaatggaccgcacttaccgcctctcccgacacatgggacgagaccaaacgggcagacatctcctaccaattactgctctattccttcgccgacagcgacggagacggatatggagacctgaatggcgtcacccaaaagctggactatctcaaccaactaggcgtgaaagccctctggctctctcccatccacccctgtatgtcttatcacggatatgacgtcacagactacaccaaagtcaatccgcagctcggcacagaaagcgacttcgaccgtctggttacagaagcccacaaccgaggcatcaagatttatctggactacgtaatgaaccacaccggcactgcccacccgtggttcaccgaagctagttcatcatccgaaagcccgtatcgcaattattattctttctctgaagacccgaaaacagatatcgcagcaggcaaaatcgccatgatcacccaagaaggagcagccggatacaatgccgcagaatggtttcaggtttctgacgagaccgctgccgtgaaaggactgctgaaatttacactggactggagcaacgcaccttcccccatccttgtcgtttccacaggcaccaaagcagacgaggataatccagacacaggtaccgacaacgccaaatacttatactacggagaagacatctgtaaaaagttttatgacaaaggaaacaacatctatgaactcaccgtcgactttgagtccacttgggggcttctgatccgtactagcaatgcttctttctggccatccggaacaaaatacggcgcctcttcctcgtccgagaaactcgcgctgaacaaggatttcaaactgaccaacgccggcaaccctgccaacatcatgttcgacagccagcagatcacctatttccattctcatttctgcaccgactggtttgccgaccttaactacggccctgtagaccaggcaggcgaatcaccggcatatcaggcaatagcagacgccgccaaaggatggatcgcccgtggtgtggacggcctccgcctcgacgccgtgaagcacatctaccacagtgagaccagcgaagaaaatcctcgtttcctgaaaatgttctatgaagatatgaacgcctattacaaacaaaaaggacatacggacgacttctatatgataggcgaagtgttatcggaatacgataaagtagctccttattataaaggtctgcccgccctttttgaattttccttctggtatcgtctggaatggggaatcaataatagtaccggatgttattttgccaaagacatcctttcttaccaacagaaatacgccaactatcgaagcgattacatcgaagcaacgaaactgagtaaccatgacgaagaccgtacatcgtccaagttgggtaaatccgccgacaaatgcaaactggccgccgccgtcttactcacttccgccggacatccttacatctattacggtgaagaactgggactttacggaacaaaggataacggagacgaatatgtgcgcagcccgatgctatggggagatagctacactaccaactacacagacaagacggatgccaccgtttcgaaaaatgtgaaaacggtagcggaccaacaagccgatacccattcacttctgaacatatatttctccctcacccgattgcgcaacacctatccggcactggcagaaggaaatatgaccaaacattccgtctacaacgaatcacaggagaaagactataagccgattgccgcctggtatatgaccaaggacaacgagaaactgcttgtcatccataatttcggcggaacggccatgcaacttccgctgacagacaagattgagaaagtattgtttgtgaatggcgaaactcaacaaaatacagacagcgacagttacaccttgaaactgggaggatacgcctctgtagtattcaagttgggcaactaa

SEQ ID NO: 114 - protein, 692 aa, Bacteroides thetaiotaomicron VPI-5482
MNKHLHFLSLLWLSMLMAFMTACSDDKNITDPAPEPEPPVEGQWTALTASPDTWDETKRADISYQLLLYSFADSDGDGYGDLNGVTQKLDYLNQLGVKALWLSPIHPCMSYHGYDVTDYTKVNPQLGTESDFDRLVTEAHNRGIKIYLDYVMNHTGTAHPWFTEASSSSESPYRNYYSFSEDPKTDIAAGKIAMITQEGAAGYNAAEWFQVSDETAAVKGLLKFTLDWSNAPSPILVVSTGTKADEDNPDTGTDNAKYLYYGEDICKKFYDKGNNIYELTVDFESTWGLLIRTSNASFWPSGTKYGASSSSEKLALNKDFKLTNAGNPANIMFDSQQITYFHSHFCTDWFADLNYGPVDQAGESPAYQAIADAAKGWIARGVDGLRLDAVKHIYHSETSEENPRFLKMFYEDMNAYYKQKGHTDDFYMIGEVLSEYDKVAPYYKGLPALFEFSFWYRLEWGINNSTGCYFAKDILSYQQKYANYRSDYIEATKLSNHDEDRTSSKLGKSADKCKLAAAVLLTSAGHPYIYYGEELGLYGTKDNGDEYVRSPMLWGDSYTTNYTDKTDATVSKNVKTVADQQADTHSLLNIYFSLTRLRNTYPALAEGNMTKHSVYNESQEKDYKPIAAWYMTKDNEKLLVIHNFGGTAMQLPLTDKIEKVLFVNGETQQNTDSDSYTLKLGGYASVVFKLGN

SEQ ID NO: 115 - DNA, 1854 bp, Bacteroides thetaiotaomicron VPI-5482
  CDS (1)..(1854): transl_table=11
atgaaaaggaatttattattcattatcttactattattattacccggtcttcaccaggtattcgcaacaagcactataaagaaagtagccccgaccttttggtgggcaggaatgaagaatcccgaattgcagatactattatatggtgaccgcatatcatccgcagacgtcagtctttctgccgataatatcacgctgcaagaagtggtgaagcaggagaatcctaattatctggttctgtatttagacctttcgaaggctgctccacagaactttgacatcatcctgaaacaaggcaaaaagcagacaaaaatcccttacgagcttaaacagcgccggccgaatgcttcggcagtagaaggttttgattcgagcgacgtgctttatcttattatgccggaccgttttgccaatggcaacccctccaacgacatcattcccggaatgctggaaggaaatgtagaccgtaatgagcctttcgcacgtcatggcggtgatttgaaaggaatagagaatcatctggattacatagcagacctcggagtcaccagtatatggctcaacccgattcaggaaaatgacatgaaagaaggatcgtatcacggttatgccattaccgattattatcaggtagaccgccgcttcggcagtaacgaagagttccgcaaacttactcaggaagctaatgccaaagggctgaaagtcgtaatggacatgatcttcaaccattgcggttcggacaactatctgtttaaagatatgccctccaaagactggtttaactttgaaggcaactacgtgcagaccagcttcaagactgccactcaaatggacccgtatgcttccgattacgaaaagaaaatcgctatcgacggttggttcacactgaccatgccggacttcaaccaaagaaaccgtcatgtagctacttatctgatacagagcagtatctggtggattgaatacgccggtatcaacggcatccgtcaggatacacacccttatgccgacttcgatatgatggcacgctggtgcaaagcggtcaatgaagaatatcccaagttcaacattgtaggtgaaacatggctgggcaacaatgtactcatctcctactggcagaaagacagcagactcgcttatccgaagaacagcaatctcccgactgtcatggacttcccgctaatggaagagatgaacaaggctttcgacgaagagactaccgaatggaacggaggacttttcagactctacgaatatctatcacaggacatcgtctacagccatccaatgagcctgctgaccttcctcgacaatcacgatacttcccgcttctaccgttcggaagcagatacaaagaatctggaccgatacaagcaagccctgacgttcttactgacaacccgcggaataccgcagatatattatggaactgaaatcctgatggcagccgacaaggcgaatggagacggcctgctccgctgcgacttccccggaggctggccgaacgatacaaaaaactgctttgacgcagccaaccgcactccacagcaaaatgaagcattctcctttatgcaaaaactgctccaatggagaaaaggaaacgaagtcattgccaaaggtcagctcaaacatttcgcaccgaataaaggtgtctacgtttacgaacgcaaatacggtgataaatcagtcgttgttttcctgaatggaaacgaccgggaacagaccattgacctggttccttaccaagaaatacttcctgcctcatctgctttcgatttattgacagagaaaaaggttgaattaagaaatgaattaacacttccaagtcgtgaaatataccttttatccttttaa

SEQ ID NO: 116 - protein, 617 aa, Bacteroides thetaiotaomicron VPI-5482
MKRNLLFIILLLLLPGLHQVFATSTIKKVAPTFWWAGMKNPELQILLYGDRISSADVSLSADNITLQEVVKQENPNYLVLYLDLSKAAPQNFDIILKQGKKQTKIPYELKQRRPNASAVEGFDSSDVLYLIMPDRFANGNPSNDIIPGMLEGNVDRNEPFARHGGDLKGIENHLDYIADLGVTSIWLNPIQENDMKEGSYHGYAITDYYQVDRRFGSNEEFRKLTQEANAKGLKVVMDMIFNHCGSDNYLFKDMPSKDWFNFEGNYVQTSFKTATQMDPYASDYEKKIAIDGWFTLTMPDFNQRNRHVATYLIQSSIWWIEYAGINGIRQDTHPYADFDMMARWCKAVNEEYPKFNIVGETWLGNNVLISYWQKDSRLAYPKNSNLPTVMDFPLMEEMNKAFDEETTEWNGGLFRLYEYLSQDIVYSHPMSLLTFLDNHDTSRFYRSEADTKNLDRYKQALTFLLTTRGIPQIYYGTEILMAADKANGDGLLRCDFPGGWPNDTKNCFDAANRTPQQNEAFSFMQKLLQWRKGNEVIAKGQLKHFAPNKGVYVYERKYGDKSVVVFLNGNDREQTIDLVPYQEILPASSAFDLLTEKKVELRNELTLPSREIYLLSF

SEQ ID NO: 117 - DNA, 1767 bp, Enterococcus faecalis V583
  CDS (1)..(1767): transl_table=11
atgaacactgctgcaatctaccatcgtccagaaagtgaatttgcttatctttatacagaagaaaccatgcatattcgtttgcgtacggcaaaaggcgacattgcctctgtccaattagtgcaaggagatccttatcttttagggaaagaaaagtggtaccaacagtcgttaaccatggagaagttagtatctacggagttatatgattactggtttattgcattaagtgcaaaatttaaacgcctttcatatgcttttactttagtaggggcggatggtttgagggcgttttatggcgaacacggcatttatcctttagaagaaaagtatttagagatggcgaataattattttcggatgccgtattttcatgaaatcgatcgttttaaagcacctgaatgggtaaaagaaacggtttggtatcaaatatttccagagcgttttgcaaatggtgatctcgccaatgatcctgaagggacgttgccgtggggatctaaaagaccagatcgacaagatttttttggtggggatttgcaaggggtgctagatcatcttgattacattgaagatttaggtgttaacggcttatatttttgcccaatttttgaagcgttttctaatcacaaatatgatacgattgattatttaaaaattgacccagcttttggtgatggtgctacctttaagcgtttagtcgaagagtgtcatcgacggggcatcaagattatgttggacgccgtttttaaccatatgggggacacttcgcctcaatggcaagatgtgttaaaaaatggccaggactcaatttatgccgattggttccacgtaaatgagtttccagctagctatgaagaaagtgctgattttgaagaagcaagcaacattacctatgatacttttgcattcactccgcatatgcctaaattaaatacagcaaatccagaagtgcaagcctatcttttagaaattgctcgttattggattgaggaatatgatattgacgcctggcgtttagatgtggcaaacgaagtggatcatgcgttctggaaaaaattccggcaaacatgtgatgacgcaaaagaagatttttatattttaggagaaatttggcactcgtcgcaaagctggctccaaggagacgaatttcatgcagtgatgaattatgcatacacagatgcgattatgggctactttgtcaagcaagaactgtccttggaaaagatgctttctgaaatgaacaaccagttaatgctctatcgacaacaaacgaatcaaatgcagtttaatgttttagattcccacgatacaccacgcttattgcatgaaacgaaagaggataaagagctgatgcgccaagtattagcgtttacgtatattcaaccaggtgtcccttgtctttactatggtgatgaaattggtatgacaggtgatatggatcctgattgtcgtcgttgtatggtttgggaggaaaatcagcaagatttggatttgaaggaatttgtaaaatcattgattgcccttcgcaaaaagtatgcggctgttttttctggtggaacaatcgattggacaggaacttcttttgaaacggggttgattagactcgcttgtcgtttggaggaacagacgatttatgggatttttaatactggccaagagacacaatttgtcgatagaactgatcgagaagttttgctaagttcttctatcgaaattgcttcagaacagataatggttttaccaaaaggttttcttttatatcaagcataa

SEQ ID NO: 118 - protein, 588 aa, Enterococcus faecalis V583
MNTAAIYHRPESEFAYLYTEETMHIRLRTAKGDIASVQLVQGDPYLLGKEKWYQQSLTMEKLVSTELYDYWFIALSAKFKRLSYAFTLVGADGLRAFYGEHGIYPLEEKYLEMANNYFRMPYFHEIDRFKAPEWVKETVWYQIFPERFANGDLANDPEGTLPWGSKRPDRQDFFGGDLQGVLDHLDYIEDLGVNGLYFCPIFEAFSNHKYDTIDYLKIDPAFGDGATFKRLVEECHRRGIKIMLDAVFNHMGDTSPQWQDVLKNGQDSIYADWFHVNEFPASYEESADFEEASNITYDTFAFTPHMPKLNTANPEVQAYLLEIARYWIEEYDIDAWRLDVANEVDHAFWKKFRQTCDDAKEDFYILGEIWHSSQSWLQGDEFHAVMNYAYTDAIMGYFVKQELSLEKMLSEMNNQLMLYRQQTNQMQFNVLDSHDTPRLLHETKEDKELMRQVLAFTYIQPGVPCLYYGDEIGMTGDMDPDCRRCMVWEENQQDLDLKEFVKSLIALRKKYAAVFSGGTIDWTGTSFETGLIRLACRLEEQTIYGIFNTGQETQFVDRTDREVLLSSSIEIASEQIMVLPKGFLLYQA

SEQ ID NO: 119 - DNA, 1614 bp, Enterococcus faecalis V583
  CDS (1)..(1614): transl_table=11
atggaccaatggtggaaaaatgctgtcggttatcaaatttatcctcggagttttaaagatagcaacggggatggcattggtgatttgcagggaattattgagaaattaccgtatttaaaagaactaggggtcgattttttatggttaaatccgatttacacttcgccaaacgttgacaatggttatgatattgcggattatcaagggattcagccagagtttggtacgatggaagattttcaagaacttttggaccaagcgcatcaattaggtttgaagattattcttgatttagtggtcaatcataccagtgatcaacatccgtggtttgttgaagcgaaaaaaagtttagataatccgtatcgtgagtattatttatgggccgatgcgacaccagatcgtatgccgaatgaatggcaaagcttttttggtggctcgacttggacgtatgacgaaggtacaaagcaagcatattttcatgtgtttgcaaaagagcaacctgatttgaactggaaaaatcctaaagttcgtgaagagatttatgcgatgattcgctggtggttagatttgggaattgatggtttccgattggatgcgattagtcatatccaaaaagaaccttgggattttaaaattaccacgaatccgtgggctccatttatgaatgtaaaaggcattgaagactatatgctggatttgaaagttatttttgctgagtatgacatcatgacagtgggggaagctagtggcgtttcaagtaaaaaagcggtggaatggaccaatgatgcgggctatctgaatatgatttttgaattagagcacaatgttcgagaaggaaagccaggagaagaacggttaaatattttaggctataaaaaagtaatggctcgctggcaaaagcatttagggacagaaggctggaatgcattatatgtagaaaatcatgataatcccagaatcaattcaattttaggcaatgaaacctctcattctgctaaggcgattggaacaatcgccttgctcttgcgaggaacaccgtttatttatcaaggacaggaaatcggcatggttaattatccgtttcaacagattgacgagttagatgctaaagattctcataaccattatcgtttgcttatagaaagtggctacgatgcgaaacaagcattaaaagaagtggcgcattggacgcgggaccattcgcgtacgcctatgcagtggacgagtcaagaggcaagttcattcacctcggggcatccgtggttagcaattcatcccaatttcaaagaaataaatgtggctgaccaagaaacggatgcgcaatccgtattgaattattataaaaagttaattgcgttgcggaaagacaatccggtctttacagatggacagtttgaactattagcgcccaatcatccgtctgtttttgcttttttaagaaaaacaactgaggcaacagcgttagtgattgtcaatttaagtggagaaaagtgccaatttgacttgccgaataaattactaggcagaaagtggcaacaattattagggaatcaagattttacggtgaagaaacggatgcagttagcaccttatcaggcaggcgtcttccaataa

SEQ ID NO: 120 - protein, 537 aa, Enterococcus faecalis V583
MDQWWKNAVGYQIYPRSFKDSNGDGIGDLQGIIEKLPYLKELGVDFLWLNPIYTSPNVDNGYDIADYQGIQPEFGTMEDFQELLDQAHQLGLKIILDLVVNHTSDQHPWFVEAKKSLDNPYREYYLWADATPDRMPNEWQSFFGGSTWTYDEGTKQAYFHVFAKEQPDLNWKNPKVREEIYAMIRWWLDLGIDGFRLDAISHIQKEPWDFKITTNPWAPFMNVKGIEDYMLDLKVIFAEYDIMTVGEASGVSSKKAVEWTNDAGYLNMIFELEHNVREGKPGEERLNILGYKKVMARWQKHLGTEGWNALYVENHDNPRINSILGNETSHSAKAIGTIALLLRGTPFIYQGQEIGMVNYPFQQIDELDAKDSHNHYRLLIESGYDAKQALKEVAHWTRDHSRTPMQWTSQEASSFTSGHPWLAIHPNFKEINVADQETDAQSVLNYYKKLIALRKDNPVFTDGQFELLAPNHPSVFAFLRKTTEATALVIVNLSGEKCQFDLPNKLLGRKWQQLLGNQDFTVKKRMQLAPYQAGVFQ

SEQ ID NO: 121 - DNA, 1674 bp, Enterococcus faecalis V583
  CDS (1)..(1674): transl_table=11
atgaacagaaattggtggcaaaaagaagtggcctatcaaatttatccacgtagcttttcggatagtaataatgacggaattggtgatttacaaggcattattcaaaaactggattacttagaaaatttaggaattacgctgatttggctgagtccaatgtacccgtcgccaatggctgacaatggatatgatatttcagactattatggtatttctagcgattttggtacaatggcagacttcgatgaactcattgaagaagcaaaaaaacgaaacataaaagttattttagatttggtggtaaaccatacatctgatgaacatgcttggtttcaagatgttttaaaaaatcctcaaagtcgttttcgagacttttatattataaaagaaggacgagaagcacctacaaattggcggtctaacttcggtggtagtgtttgggaaaaattacctggggaagatgcctactactttcatgcctttcataaaaaacagccggatttaaattgggaaaatcctgaactacgcaaagaaatctatcaaatgattcgtttttggttaaacaaaggaattgctggttttcgtgtagatgcgattaattttattaagaaagatttgacttggacaaacttacctgctgatggggcagatcaattagccaaagtaacaaaagctagtagaaacatgccaggaatgagtgactttctgaacgaattaaaagaaaaagcttttgctggctttgatattgtcacagttgccgaagcggccggcgtcaattatctaaatttatcagaatttattggagaaacagggtatttcgacatgatttttgacttcaaatgggctgatttggatgtgaaatcaggaagcgaatggttttatagaatcgattggtcttggaatgatttacgcacattaattttcaaacagcaagaagccatgcaagaggctggttggagtgcaaattttattgaaaatcatgatcaacctcgagcgacaacgaaatatttaaaagaacaggctcaacagccaaatgcggttaaaacattcggcgccatgtatttctttttaaggggcacgccttttatttaccaaggacaagaattaggaatgaccaattttgaaaggggttcgattgatgaattcgatgatatttctagcattgatcaatactatcgagcaataaaagaaggatttacgcccaaagaagccttgtcacttgtcaatttgcgtagtcgagacaatgcccgcacgccttttccatggaatgattctatgtatggcggtttttcaagcgtcaagccttggttaggaatggtggataattataaagaaatcaatgccgaagcagaaataaaaaatagtcaaagtatttttcatttctataagcggatgattgcatttcgtcaaaagagtccctatacagacatcttactttatggaacatttgagggtctgtcaaatcttccagataatgttattgcttataaacgcaaattaaatgaaaaaacgatttacgccttttttaattttggtgaggcggttccaatccctcattatttagttaatggcacagttatttttgatacacagtctgaagaacgagagcaattagttcagcagggaacattattaaaaagctatcaaggactattgattactataaatgagtag

SEQ ID NO: 122 - protein, 557 aa, Enterococcus faecalis V583
MNRNWWQKEVAYQIYPRSFSDSNNDGIGDLQGIIQKLDYLENLGITLIWLSPMYPSPMADNGYDISDYYGISSDFGTMADFDELIEEAKKRNIKVILDLVVNHTSDEHAWFQDVLKNPQSRFRDFYIIKEGREAPTNWRSNFGGSVWEKLPGEDAYYFHAFHKKQPDLNWENPELRKEIYQMIRFWLNKGIAGFRVDAINFIKKDLTWTNLPADGADQLAKVTKASRNMPGMSDFLNELKEKAFAGFDIVTVAEAAGVNYLNLSEFIGETGYFDMIFDFKWADLDVKSGSEWFYRIDWSWNDLRTLIFKQQEAMQEAGWSANFIENHDQPRATTKYLKEQAQQPNAVKTFGAMYFFLRGTPFIYQGQELGMTNFERGSIDEFDDISSIDQYYRAIKEGFTPKEALSLVNLRSRDNARTPFPWNDSMYGGFSSVKPWLGMVDNYKEINAEAEIKNSQSIFHFYKRMIAFRQKSPYTDILLYGTFEGLSNLPDNVIAYKRKLNEKTIYAFFNFGEAVPIPHYLVNGTVIFDTQSEEREQLVQQGTLLKSYQGLLITINE

SEQ ID NO: 123 - DNA, 1719 bp, Streptomyces avermitilis MA-4680
  CDS (1)..(1719)
atgatcgtcaacgagcccgtcccggacaccttcgaggacacgcccgccaaggaccgcgatccggagtggttcaaacgcgccgtcttctacgaggtcctggtccgctccttccaggacagcaacggcgacggtgtcggcgacctgaagggcctgaccgccaagctggactatctgcagtggctgggcgtggactgcctgtggctgccgccgttcttcaagtcccccctgcgcgacggcggctacgacgtctccgactacaccgcggtgctgcccgagttcggtgacctggccgacttcgtcgagttcgtggacgcggcccaccagcgcggcatgcgcgtgatcatcgacttcgtgatgaaccacaccagcgacctgcacccgtggttccaggagtcccgcagcaaccccgacggcccctacggcgactactacgtgtgggccgacgacgacaagcagtaccaggacgcccggatcatcttcgtcgacaccgaggcctccaactggaccttcgacccggtccgcaagcagtactactggcaccgcttcttctcccaccagcccgacctcaactacgagaacccggcggtgcaggaggagatcgtctccgccctgcggttctggctcgacctcggcatcgacggcttccgcctcgacgcggtgccgtacctgtaccagcaggaaggcaccaactgcgagaacctgccggcgacgcacgagttcctgaagcgggtgcgcaaggagatcgacacgcactatccggacacggtgctgctcgcggaggcgaaccagtggccggaggacgtggtcgactacttcggcgacttcccctcgggcggcgacgagtgccacatggcgttccatttcccggtcatgccgcggatcttcatggcggtgcggcgtgagtcgcggtatccggtgtcggagatcctggcgaagacgccggcgatcccgtcgagctgccagtggggcatcttcctgcgcaaccacgacgagctgaccctggagatggtcaccgacgaggaacgcgactacatgtgggcggagtacgccaaggatccgcggatgcgggccaacatcggcatccgccggcgtctggcgccgctgctggacaacgaccgcaaccagatcgagctgttcaccgcgctgctgctgtcgctgcccggctcgccgatcctctactacggcgacgagatcggcatgggggacaacatctggctcggtgaccgggacgcggtgcgcactccgatgcagtggacgccggaccgcaacgcgggtttctcgtcctgcgacccggggcgtctgtatctgcccacgatcatggatccggtctacgggtaccaggtcacgaacgtggaggcgtcgatgtcgtcgccgtcctcgctgctgcactggacccggcggatgatcgagatccgtaagcagaacccggcgttcggcctcggctcgtacaccgaactccagtcctcgaacccggccgtcctcgcgttcctgcgggaggccccctcgaccggggggaacggggacgacctggtgctgtgcgtgcacaacttctcccggttcgcgcagcccacggagctggatctgcgggcgttcagcggccgtcatccggtcgagctgatcggcggtgtccgcttcccggccatcggggaactcccgtatctgctgaccctggcaggccacggcttctactggttccggctccgcaaggacgccgtctag

SEQ ID NO: 124 - protein, 572 aa, Streptomyces avermitilis MA-4680
MIVNEPVPDTFEDTPAKDRDPEWFKRAVFYEVLVRSFQDSNGDGVGDLKGLTAKLDYLQWLGVDCLWLPPFFKSPLRDGGYDVSDYTAVLPEFGDLADFVEFVDAAHQRGMRVIIDFVMNHTSDLHPWFQESRSNPDGPYGDYYVWADDDKQYQDARIIFVDTEASNWTFDPVRKQYYWHRFFSHQPDLNYENPAVQEEIVSALRFWLDLGIDGFRLDAVPYLYQQEGTNCENLPATHEFLKRVRKEIDTHYPDTVLLAEANQWPEDVVDYFGDFPSGGDECHMAFHFPVMPRIFMAVRRESRYPVSEILAKTPAIPSSCQWGIFLRNHDELTLEMVTDEERDYMWAEYAKDPRMRANIGIRRRLAPLLDNDRNQIELFTALLLSLPGSPILYYGDEIGMGDNIWLGDRDAVRTPMQWTPDRNAGFSSCDPGRLYLPTIMDPVYGYQVTNVEASMSSPSSLLHWTRRMIEIRKQNPAFGLGSYTELQSSNPAVLAFLREAPSTGGNGDDLVLCVHNFSRFAQPTELDLRAFSGRHPVELIGGVRFPAIGELPYLLTLAGHGFYWFRLRKDAV

SEQ ID NO: 125 - DNA, 1752 bp, Streptomyces avermitilis MA-4680
  CDS (1)..(1752)
atgatcgtcaacgagcccgtcccggacaccttcgaggacacgcccgccaaggaccgcgatccggagtggttcaaacgcgccgtcttctacgaggtcctggtccgctccttccaggacagcaacggcgacggtgtcggcgacctgaagggcctgaccgccaagctggactatctgcagtggctgggcgtggactgcctgtggctgccgccgttcttcaagtcccccctgcgcgacggcggctacgacgtctccgactacaccgcggtgctgcccgagttcggtgacctggccgacttcgtcgagttcgtggacgcggcccaccagcgcggcatgcgcgtgatcatcgacttcgtgatgaaccacaccagtgacctgcatccgtggttccaggagtcccgcagcaaccccgacggcccctacggcgactactacgtgtgggccgacgacgacaagcagtaccaggacgcccggatcatcttcgtcgacaccgaggcctccaactggacgtacgacccggtccgcaagcagtactactggcaccgcttcttctcccaccagcccgacctcaactacgagagtgccgccgtccaggaggagatcctggcggcgctgcggttctggctcgatctgggcatcgacggcttcaggctggacgccgtcccctacctgtacaacgaagaggggacgaactgcgagaacctgccggcgacgcacgagttcctgaagcgggtgcgcaaggagatcgacacgcactatccggacacggtgctgctcgcggaggcgaaccagtggccggaggacgtggtcgactacttcggcgacttcccctcgggcggcgacgagtgccacatggcgttccatttcccggtcatgccgcggatcttcatggcggtgcggcgtgagtcgcggtatccggtgtcggagatcctggcgaagacgccggcgatcccgtcgagctgccagtggggcatcttcctgcgcaaccacgacgagctgaccctggagatggtcaccgacgaggaacgcgactacatgtgggcggagtacgccaaggatccgcggatgcgggccaacatcggcatccgccggcgtctggcgccgctgctggacaacgaccgcaaccagatcgagctgttcaccgcgctgctgctgtcgctgcccggctcgccgatcctctactacggcgacgagatcgggatgggggacaacatctggctcggtgaccgggacgcggtgcgcacgccgatgcagtggacgccggaccgcaacgcgggtttctcgtcctgcgacccggggcgtctgtatctgcccacgatcatggatccggtctacgggtaccaggtcacgaacgtggaggcgtcgatgtcgtcgccgtcctcgctgctgcactggacccggcggatgatcgagatccgtaagcagaacccggcgttcggcctcggctcgtacaccgaactccagtcctcgaacccggccgtcctcgcgttcctgcgggaggccccctcgaccggggggaacggggacgacctggtgctgtgcgtgcacaacttctcccggttcgcgcagcccacggagctggatctgcgggcgttcagcggccgtcatccggtcgagctgatcggcggtgtccgcttcccggccatcggggaactcccgtatctgctgaccctggcaggccacggcttctactggttccggctccgcaaggacgtcacccaggtcaccaaggtgagcttgttcgtgagctcttga

SEQ ID NO: 126 - protein, 583 aa, Streptomyces avermitilis MA-4680
MIVNEPVPDTFEDTPAKDRDPEWFKRAVFYEVLVRSFQDSNGDGVGDLKGLTAKLDYLQWLGVDCLWLPPFFKSPLRDGGYDVSDYTAVLPEFGDLADFVEFVDAAHQRGMRVIIDFVMNHTSDLHPWFQESRSNPDGPYGDYYVWADDDKQYQDARIIFVDTEASNWTYDPVRKQYYWHRFFSHQPDLNYESAAVQEEILAALRFWLDLGIDGFRLDAVPYLYNEEGTNCENLPATHEFLKRVRKEIDTHYPDTVLLAEANQWPEDVVDYFGDFPSGGDECHMAFHFPVMPRIFMAVRRESRYPVSEILAKTPAIPSSCQWGIFLRNHDELTLEMVTDEERDYMWAEYAKDPRMRANIGIRRRLAPLLDNDRNQIELFTALLLSLPGSPILYYGDEIGMGDNIWLGDRDAVRTPMQWTPDRNAGFSSCDPGRLYLPTIMDPVYGYQVTNVEASMSSPSSLLHWTRRMIEIRKQNPAFGLGSYTELQSSNPAVLAFLREAPSTGGNGDDLVLCVHNFSRFAQPTELDLRAFSGRHPVELIGGVRFPAIGELPYLLTLAGHGFYWFRLRKDVTQVTKVSLFVSS

SEQ ID NO: 127 - DNA, 1665 bp, Bacillus anthracis str. Ames
  CDS (1)..(1665): transl_table=11
atgaataagacatggtggaaagaagcggttgcttatcaaatttatccacgtagctttatggattcaaatggtgatggtattggagatttacaaggtattattgcgaaactggattatttaaaagatttaggaatagatgtaatttggatttgtccaatgtataagtcacctaatgatgataatggttatgacattagtgattatcaagatattatggatgagtttgggacgatggaagactttgatgctttactagatgaagttcataaacgtgatatgaagcttattattgatttagttattaatcatacaagtgatgaacatccatggtttattgagtctcgttcatctaaagacaatccgaagcgtgattggtatatttggcatgatggtaaagatggtgcagaaccaaacaactgggaaagtatttttaatggttcggcatgggagtatgatgaagtaacaggacaatattatttacacttattctcgcgtaaacaaccagatttaaactgggagaataaagaagttcgagaagtgctatacgatacagttaattggtggcttgataaaggaattgatggtttccgagtagatgcaatcagccatattaaaaaagaagatggctttaaagatatgccaaatccaaaaggactaaagtatgttccatcttttgataaacatatgaatgtggatggtattcaacctttattagaagaattaaaagaaaatacgttttctaagtacgatattatgactgttggtgaagcgaatggcgttaagattgaagatgctgagctttgggttggagaagagcaaggtaagttcaatatggtattccaattcgaacatttaagtttatgggatgcagaaaagaagaaagatcttgatgttgtagggctgaaaaaggtattaacgaaatggcaaaaagggttagaaaataaaggatggaatgctttatatattgagaatcacgataagccgcgtatcgtttcaacttggggagatgataaacaatattggcgtgaaagtgcgacagctttaggagcaatgtatttctttatgcacggtacaccgtttatttatcaaggacaagaaattgggatgacaaatgttcaattcccaaacattgaagattacgatgatgtagcaattaaaaatttatatcgcgagaaaattgcagagggcgtatcccatcaagatatgatggaaattatatgggcttcttgccgcgataattcacgtacgcctatgcattgggacgatgagataaatgctggtttcacaacaggtacgccttggtttggtatgaatcaaaactacaaagaaatcaatgttgcaaagcaaaagaatgaagagaactctattttcaatttctataagaaaatgattgccctgaaaaaagagcatgatgtactgaattatggtacgtacgatttacttttagaagatgacccgcaaatttatgcatatactcgtacactaaacgatgaaaaaatagtcgtaattagtaatatctcaaaagaggaagctgtgtataatgaggatttatttgcactagaacgcaaacgtttgcttttaaataactatgaagttgcggaacatgaacaattaactacaatcacgttaaagccttatgaaacaagggtttatcgcatttcataa

SEQ ID NO: 128 - protein, 554 aa, Bacillus anthracis str. Ames
MNKTWWKEAVAYQIYPRSFMDSNGDGIGDLQGIIAKLDYLKDLGIDVIWICPMYKSPNDDNGYDISDYQDIMDEFGTMEDFDALLDEVHKRDMKLIIDLVINHTSDEHPWFIESRSSKDNPKRDWYIWHDGKDGAEPNNWESIFNGSAWEYDEVTGQYYLHLFSRKQPDLNWENKEVREVLYDTVNWWLDKGIDGFRVDAISHIKKEDGFKDMPNPKGLKYVPSFDKHMNVDGIQPLLEELKENTFSKYDIMTVGEANGVKIEDAELWVGEEQGKFNMVFQFEHLSLWDAEKKKDLDVVGLKKVLTKWQKGLENKGWNALYIENHDKPRIVSTWGDDKQYWRESATALGAMYFFMHGTPFIYQGQEIGMTNVQFPNIEDYDDVAIKNLYREKIAEGVSHQDMMEIIWASCRDNSRTPMHWDDEINAGFTTGTPWFGMNQNYKEINVAKQKNEENSIFNFYKKMIALKKEHDVLNYGTYDLLLEDDPQIYAYTRTLNDEKIVVISNISKEEAVYNEDLFALERKRLLLNNYEVAEHEQLTTITLKPYETRVYRIS

SEQ ID NO: 129 - DNA, 1761 bp, Bacillus anthracis str. Ames
  CDS (1)..(1761): transl_table=11
atgcttaaagaagccatttatcataggccaaaagataattacgcatacgcttacgatgaaaaaacgattcacatccgaatacgtacgaaaagagacgatgttcaaagcaccactcttatttatggtgatccttatgaatggaaagacgggaagtggatttcttcaagtacaccgatgaaaaaaactggttctactgcattgtttgattattggttcatttccatcgagccgaaatttaagcgcttacgttatggatttgaattaaaaaacgatacagacactcttatttatgcagagcgaggatttttttctaccactccaaatgatgacgttggtaactttttctgttttccatttattcatgcaaatgatgtattcaaagcaccttcttggattaaagatactgtttggtatcaaattttcccagaacggttcgctaatggagatcatacgctgaatccagaaaacacccttccttggggcagcgctgagccaactccaactaattttttcggtggagattttgctggtattattcaaaaccttgattaccttgttaagcttggaatttcaggaatatatttcacacctattttcaaagcacattcaaaccataaatatgacacaattgactacatggaaatcgatccacaatttggtacaaaagaaacattcaaagaactcgttcaggcatgtcatacacacggtataaaagtaatgctcgatgctgtattcaatcacagtggatactttttcgataaatttcaagacgtactacaaaatggtgagcagtcagcatataaagaatggttccatattcatgagttcccaattagaactgagccactcccgaattatgatactttcgcgtttacaccgtatatgccgaaattaaacacagcgcacccggatgtaaaagaatacttacttgaagtagggcgttattgggtgagagaattcaatatagacggttggcgccttgatgtagcaaatgaagtcgaccataacttttggagagaatttcgaagtgagataaaagcattaaattctgaagtatatattttaggagaaatttggcacgatgcacttccatggctacaaggagatcaattcgatgctgtcatgagctatcctgttacaaacgccctactgtcttactttgctaacgattccattaaggcaaatgaatttatgaaacaaattacagaatctctacattcctactctatgaatgtaaatgaagcagcatttcatttattagatagccatgatacaccaagaattttgacaacatgtaacggagataaaaataagttaaaattactttatgtattccatctttctttcatcggctctccttgtatttattatggagacgaaattggtatggacggcggtatggacccagattgtcgcaaatgtatggtttgggatacggaagaacaagatcatacattatttacacatgtacaaacattaatttcattacgaaagcaatataaagcatttggaggacatggtactttccaattcattgaagcaaatgatgaatataattatatttcttatacgaaaacatatgaagatgaaacgatctttttcgttttaaatccgactaatagtgatattacagcttcactccctctccatgttactggaaagaaaatcattaatatttatacaaacgaagaattttcagcggaagcaagtgtattacaagttacacttcctccatatggattctccatattaaaatggtaa

SEQ ID NO: 130 - protein, 586 aa, Bacillus anthracis str. Ames
MLKEAIYHRPKDNYAYAYDEKTIHIRIRTKRDDVQSTTLIYGDPYEWKDGKWISSSTPMKKTGSTALFDYWFISIEPKFKRLRYGFELKNDTDTLIYAERGFFSTTPNDDVGNFFCFPFIHANDVFKAPSWIKDTVWYQIFPERFANGDHTLNPENTLPWGSAEPTPTNFFGGDFAGIIQNLDYLVKLGISGIYFTPIFKAHSNHKYDTIDYMEIDPQFGTKETFKELVQACHTHGIKVMLDAVFNHSGYFFDKFQDVLQNGEQSAYKEWFHIHEFPIRTEPLPNYDTFAFTPYMPKLNTAHPDVKEYLLEVGRYWVREFNIDGWRLDVANEVDHNFWREFRSEIKALNSEVYILGEIWHDALPWLQGDQFDAVMSYPVTNALLSYFANDSIKANEFMKQITESLHSYSMNVNEAAFHLLDSHDTPRILTTCNGDKNKLKLLYVFHLSFIGSPCIYYGDEIGMDGGMDPDCRKCMVWDTEEQDHTLFTHVQTLISLRKQYKAFGGHGTFQFIEANDEYNYISYTKTYEDETIFFVLNPTNSDITASLPLHVTGKKIINIYTNEEFSAEASVLQVTLPPYGFSILKW

SEQ ID NO: 131 - DNA, 1641 bp, Mycobacterium bovis AF2122/97
  CDS (1)..(1641): transl_table=11
atggaccaacaccagcgaccggatccaatgggccccggctctcctcgcgccagcgctcgtcgaccggagccagatccgatgggcgagccgtggtggtcgcgagccgtgttctaccaggtctatccccgatcgttcgccgacagcaacggcgacggggtgggcgacctggacgggttggcgagccggcttgaccacctgcaacagctcggtgtcgacgcgatctggatcaacccggtcaccgtctcgccgatggcagaccacggatacgacgtcgccgatccccgcgacatcgacccactcttcggcgggatgccggcgttcgaacggttggtcgctgcggcacaccggcagggcatcaaagtcaccatggacgtggtgcccaaccacaccagttcggcgcacccatggtttcaggccgcgctggctgacctcccgggtagcccggcgcgggatcgctatttctttcgcgacgggcggggccccgacgggtcgctgccgccgaacaactgggagtcggtgttcggcgggccggcctggacccgagtgcgcgaaccggacggcaacccgggccagtggtacctgcaccttttcgacaccgaacagccggacctgaactcggacaacccggaaatccttgacgacttcgagaaaacactgcgcttctggctggaccgcggcgtggatggcttccgcatcgacgtggcgcacggcatggccaagcccccgggcctgccggactcaccggacctgggcatcgaggtgctgcaccaccgcgatgacgacccgcgcttcaaccacccgaatgtgcacgcgattcaccgcgacatccgcacggtgatcgacgagtaccccggagcggtaaccgtcggcgaggtgtgggtacacgacaacgcccgctgggcggagtatctgcggcccgacgaactgcatctcggcttcaatttccggctggcgcgaaccgagttcgacgccgccgagatccgcgacgcggtggcgaactccctggccgccgcggcgctgcagaacgcgaccccaacctggacgctggccaatcacgatgtgggacgggaggttagccgctacggcggcggcgagatcgggctgcgccgggccaaggcgatggcggtggtgatgctcgccctgccgggcgtggtcttcctctacaacggccaggaactgggtttgcccgacgtggacctgcccgacgaggtgctgcaggatccgacgtgggaacgctcgggacgcaccgaacgcggtcgcgatggctgccgggtgccgattccctggtcgggcaacattcccccgttcgggttctcgacgtgtccagacacctggttgccgatgccgccggaatgggcggcgctgaccgccgaaaaacaacgcgctgatgccggctcgaccttgtcgttttttcgacttgcactcagattacgtagggaacgaaatgaattcgacggcgacgtcgactggctggccgcgcccgacgatgcgctgatattccggcgtcacggcgggggtttggtgtgcgcgctcaacgccgctgagcgtccgctggcgctgccggcaggtgaacccatcctggccagcgcaccgttgaccgacgccacgttgccacccaatgccgcggcctggctggtgtag

SEQ ID NO: 132 - protein, 546 aa, Mycobacterium bovis AF2122/97
MDQHQRPDPMGPGSPRASARRPEPDPMGEPWWSRAVFYQVYPRSFADSNGDGVGDLDGLASRLDHLQQLGVDAIWINPVTVSPMADHGYDVADPRDIDPLFGGMPAFERLVAAAHRQGIKVTMDVVPNHTSSAHPWFQAALADLPGSPARDRYFFRDGRGPDGSLPPNNWESVFGGPAWTRVREPDGNPGQWYLHLFDTEQPDLNSDNPEILDDFEKTLRFWLDRGVDGFRIDVAHGMAKPPGLPDSPDLGIEVLHHRDDDPRFNHPNVHAIHRDIRTVIDEYPGAVTVGEVWVHDNARWAEYLRPDELHLGFNFRLARTEFDAAEIRDAVANSLAAAALQNATPTWTLANHDVGREVSRYGGGEIGLRRAKAMAVVMLALPGVVFLYNGQELGLPDVDLPDEVLQDPTWERSGRTERGRDGCRVPIPWSGNIPPFGFSTCPDTWLPMPPEWAALTAEKQRADAGSTLSFFRLALRLRRERNEFDGDVDWLAAPDDALIFRRHGGGLVCALNAAERPLALPAGEPILASAPLTDATLPPNAAAWLV

SEQ ID NO: 133 - DNA, 1761 bp, Rhodopirellula baltica SH 1
  CDS (1)..(1761): transl_table=11
ttgcatgggcggaacatggcgactgtcgagtacgaaatgcagcaacaggcaatcgccccgcgttttgccaattcgaattttacgcctcacaaccgaccaaggcatcccttcactatcaaaacgcattcacaaaaatctgctccgtcgaaaccagccgaacgtcgctggtgggaaaccggtgtgatctatcaaatctatccgcggtctttccaagacagcaatgccgacggtgtgggcgatctggcaggtatcaagcaacggctggactatctggttcgcctcggagttgacgcggtatggctttcaccgatttatccttcgccgatgttcgatttcggttacgacgtctcggactactgcggcattgatccgttgttcggtgatctgacagccttcgatcggttgctcaccgccatgcattcgcgtggtctcaagcttctgatggactttgttccgaaccactcatcagatcaacatccatggtttgtccagagccgttcatctcgcgacaatcccaagcgggattggtacatctggcgagatgcatcagctgacggcggtccacctaacaattggatcagcgatttcggtggctcgtcttggcaatgggacgcaacgacccggcaatactatttgcacgcctttcttccgcagcaacccgatctcaactggcgtcatcccgaactgcgtgaggcgatgatgaatgtcctgcggttctggttggatcgcggtgtcgatggatttcgcatggacgtgctttggcacatcgtcaaagacgccgctcttcgagacaatccgatcaatccggactggacgtctgaccgtacacagcgtgaccagctgattcagctgcactccaccgaccaaccagaagcccattcaatcgcggctgagtttcgcactttggcggacaactacggtgatcgcgttttgattggtgagatcagcctgcccaatgatcgactcgcgcgatggtttgggacggaagaacgaccggaggtacatctgccgaccaactttcatctcatcgaatgcgagtggaacgctccaaccctccgacgtgtgatcgctaactacgaagcgtcccttccaaactttggatggccgaactgggttttgggcagtcacgatgctcctcgcattgccgcccgacttggtgacgctcaatcccgagtcgccgccatgctgctgctaaccctgcgtggcacgcccacgctctatcaaggcgacgaaattgggattggtgaggtccccattcctcgcgatcaaattcgcgaccctcaggatttacggcaacctgaactgaatatcggacgagatcgatctcgcacgccgatgccttgggacgattccgccttcgccggtttcagcgtcaacgacacgtggctcccgctcaatcctgattggcgtcaaagaaacgttgcgacgcaggaggctgatccacagtcaattttgaatttgtacagaacactgctctcgcttcggcgaagccacgctgcgttatcgaacggcgacttcacacttctcgattccgacgatgatgtgctcgctttcgaaagaagacacggcgacgaacacctgttgatcgcgctgaacctcagtgagcaaacccgatcgttgccggtgccgtcgaaagctgccctcgtcacggtgctctgttccaccgtgtctcctcgagcaatcgatggaactctcgtaccaaacgaagggctgcttctgcaattggtagacaacgaagatcaatccgggcaagtttcatga

SEQ ID NO: 134 - protein, 586 aa, Rhodopirellula baltica SH 1
MHGRNMATVEYEMQQQAIAPRFANSNFTPHNRPRHPFTIKTHSQKSAPSKPAERRWWETGVIYQIYPRSFQDSNADGVGDLAGIKQRLDYLVRLGVDAVWLSPIYPSPMFDFGYDVSDYCGIDPLFGDLTAFDRLLTAMHSRGLKLLMDFVPNHSSDQHPWFVQSRSSRDNPKRDWYIWRDASADGGPPNNWISDFGGSSWQWDATTRQYYLHAFLPQQPDLNWRHPELREAMMNVLRFWLDRGVDGFRMDVLWHIVKDAALRDNPINPDWTSDRTQRDQLIQLHSTDQPEAHSIAAEFRTLADNYGDRVLIGEISLPNDRLARWFGTEERPEVHLPTNFHLIECEWNAPTLRRVIANYEASLPNFGWPNWVLGSHDAPRIAARLGDAQSRVAAMLLLTLRGTPTLYQGDEIGIGEVPIPRDQIRDPQDLRQPELNIGRDRSRTPMPWDDSAFAGFSVNDTWLPLNPDWRQRNVATQEADPQSILNLYRTLLSLRRSHAALSNGDFTLLDSDDDVLAFERRHGDEHLLIALNLSEQTRSLPVPSKAALVTVLCSTVSPRAIDGTLVPNEGLLLQLVDNEDQSGQVS

SEQ ID NO: 135 - DNA, 3342 bp, Bordetella pertussis Tohama I
  CDS (1)..(3342): transl_table=11
atgcctgccacccatcccgctcccgacccgctctggtacaaggacgccgtcatctaccagttgcacgtcaagtccttcttcgacgccaacgacgacggcgtgggcgacttcgccggcctgctggccaagctggactacatcgtcgagctgggcgtcaataccatctggctgctgccgttctatccgtcgccgcgccgcgacgacggctacgacatcgccgactatcgcggggtgcaccccgactatggctcgctggccgacgcccggctgctggtgcgggcggcccacgcgcgcggcctgcgcgtcatcaccgagctggtcatcaaccacacctccgaccagcacccttggttccagcgcgcccgcgccgcgcggccgggttcggcgcaccgcgcctattacgtctggtcggacgacgacaaggcctatgccggcacgcgcatcatcttctgcgacacggaaaagtccaactggacctgggacccggtggccggcgcctatttctggcaccgcttctattcgcaccagcccgacctgaactacgacaatccgcaggtgctgcgcgaagtgctgggcgcgatgcgctactggctggacatgggcgtggacggcctgcgcctggacgcggtgccctacctggtcgagcgggaaggcaccaacaacgagaacctgccggaaacccacgccatcctgcggcgcatccgccgcgtcatcgacagcgagtatcccggcaggatgctgctggccgaggccaaccagtggcccgaggacgcgcaagagtacttcggcgccggcgacgaatgccacatggcgttccactttcccctgatgccgcgcatgtacatggccatcgcgcaggaggaccgcctgcccgtcaccgacatcatccgccagacgccgtccatcgcgccgcaatgccaatgggccattttcctgcgcaaccacgacgagctgaccctggagatggtgaccagccgcgaacgcgactacctgtggaacgtctacgcggccgagccgcgcgcgcgcatcaacctgggcatccggcgccgcctggcgccgctgctcgagcgcgaccggcgccgcatcgaactgatgaacagcctgctgctgtccatgccgggcacgccggtgctgtactacggcgacgagctgggcatgggcgacaacatccacctgggcgaccgcgacggcgtgcgcacgcccatgcaatggtcgcccgaccgcaacggcggcttctcgcgcgccgaccccgagcgcctgccgctgccgctgctgatggggccgctgtacggctacgaggcggtcaacgtggaggcgcagcagcgcgacccgcattcgctgctgaactggacccgccgcatgctggccaagcgccgccagagccatgtgttcggccgtggcgaactgtcgttcctgtatccgggcaaccgcaagatcctggcctatctgcgcacctgggaagacacggtggtgctgtgcgtggccaacctttcgcaggcggcccagccggtcgaactgcacctgtccgagtacgccggccgcgtaccggtggaaatgctgggcggcaccgcctttccgcagatcggcgagctgccctatctgctgacgctgccgcctttcggcttctactggctggacctgagcgccggcgccgcgccgcccgcgtggcacagcgagctgccgccgcaaatgccggaatcgatcaccctggtgtcgcgcggcgcgggcgcggcgctgcgcctgaccgaggcatcgcgccgccagctggaagcggacgtgctgccggcctacctgcagcggcagcgctggtatgccgcgcgccgcaagcccggcgtcatgcggctggcctacagcgtgccgctgaacgacgacgtggaaagctattacgaagccgagatcgaagtcagcgacgacggaccgccgcgccgcttccatacgccggtggcgctggcctggcaggacgataccgccgcccagtatccgctggcgcgcgtgcggcgcggcgcgcagctgggcacgctcaccgacgcctcgctgcagcccggctatgcgcgcgtgctgctggcggccctgacggccggccgcgatatccaggccggcggcgagcccgccgtgcggctgcgcttcctgcccgagccgggcctggccgacctggcgctgcgcgatgacagcgaggtgcgcgcgctcagcgccgaccagtccaacagttcgctgctggtcggcgagcgcgtcgtgttcaagctgctgcgcgagctgcatgccggcccgcaccccgaagccgagatgacgcgctacctcacccaggccggctacgcgcatacgccggcgctgctaggcgaggtcgtgcgcgtgcagggcgaccaggcgccccatacgctggcgctggcccacgcctacgtcgtcaacgaaggcgatgcgtggaactggaccgtggcctacctgaaacgcacgctcgacgccgccatactgaccggcgccagcgccgacgactaccagcaggaactggccggctacgaagtgctggccggcaccatcgggcaacgcctggctcagatgcactcggtgctggcgcgcgccggcgaactgccgggcttcgcgccgcggccggccagcgagcgcgacgccgccctggcgggcgagcgcgcggtggcgcagctggaccgcgcgctgcaggccttgcgggcgtgcgagagcgggctcgcccctgcatcgcacgcctgcgcgcaatggctgttcgagcatcgcgaccggctggcggcccacatcatgacactggcgcaggccgaaaccggcgcgctgcgcatccgcgtgcacggcgacttccatctcggccagatcctggtcgcgcagaccgacgcctacctgatcgatttcgagggcgagccggcccggcccatggccgagcgccggcaactgagcagcccgttcaaggacgttgccggtattctgcgctcgttcgactatgcggtggccgaactcagccgcgacgatccgctgggcggcgcgccgcgcgacttcaacaccggcgtggccgagccggccgacccggccagcgcgccccgggaaacgcgcgaggcgctgctggcgcgcttccggcagcgcgccggcgcggccctgctggccagctatggcaatgccatcgaccccgtgctggccttgccgcccgagcgtgcccaggcgcttacctgcctgtacctgctggagaaggccgcctacgaaatctgctacgagtcggcctaccggcccgagcgcctgccggtgcccatccatggcctggccgaaaccgcccgcgccgcgctgctggcggccgccgtcgaccacgatgaaggaccggcgccatga

SEQ ID NO: 136 - protein, 1113 aa, Bordetella pertussis Tohama I
MPATHPAPDPLWYKDAVIYQLHVKSFFDANDDGVGDFAGLLAKLDYIVELGVNTIWLLPFYPSPRRDDGYDIADYRGVHPDYGSLADARLLVRAAHARGLRVITELVINHTSDQHPWFQRARAARPGSAHRAYYVWSDDDKAYAGTRIIFCDTEKSNWTWDPVAGAYFWHRFYSHQPDLNYDNPQVLREVLGAMRYWLDMGVDGLRLDAVPYLVEREGTNNENLPETHAILRRIRRVIDSEYPGRMLLAEANQWPEDAQEYFGAGDECHMAFHFPLMPRMYMAIAQEDRLPVTDIIRQTPSIAPQCQWAIFLRNHDELTLEMVTSRERDYLWNVYAAEPRARINLGIRRRLAPLLERDRRRIELMNSLLLSMPGTPVLYYGDELGMGDNIHLGDRDGVRTPMQWSPDRNGGFSRADPERLPLPLLMGPLYGYEAVNVEAQQRDPHSLLNWTRRMLAKRRQSHVFGRGELSFLYPGNRKILAYLRTWEDTVVLCVANLSQAAQPVELHLSEYAGRVPVEMLGGTAFPQIGELPYLLTLPPFGFYWLDLSAGAAPPAWHSELPPQMPESITLVSRGAGAALRLTEASRRQLEADVLPAYLQRQRWYAARRKPGVMRLAYSVPLNDDVESYYEAEIEVSDDGPPRRFHTPVALAWQDDTAAQYPLARVRRGAQLGTLTDASLQPGYARVLLAALTAGRDIQAGGEPAVRLRFLPEPGLADLALRDDSEVRALSADQSNSSLLVGERVVFKLLRELHAGPHPEAEMTRYLTQAGYAHTPALLGEVVRVQGDQAPHTLALAHAYVVNEGDAWNWTVAYLKRTLDAAILTGASADDYQQELAGYEVLAGTIGQRLAQMHSVLARAGELPGFAPRPASERDAALAGERAVAQLDRALQALRACESGLAPASHACAQWLFEHRDRLAAHIMTLAQAETGALRIRVHGDFHLGQILVAQTDAYLIDFEGEPARPMAERRQLSSPFKDVAGILRSFDYAVAELSRDDPLGGAPRDFNTGVAEPADPASAPRETREALLARFRQRAGAALLASYGNAIDPVLALPPERAQALTCLYLLEKAAYEICYESAYRPERLPVPIHGLAETARAALLAAAVDHDEGPAP

SEQ ID NO: 137 - DNA, 3342 bp, Bordetella bronchiseptica RB50
  CDS (1)..(3342)
atgcctgccacccatcccgctcccgacccgctctggtacaaggacgccgtcatctaccagttgcacgtcaagtccttcttcgacgccaacgacgacggcgtgggcgacttcgccggcctgctggccaagctggactacatcgtcgagctgggcgtcaataccatctggctgctgccgttctatccgtcgccgcgccgcgacgacggctacgacatcgccgactatcgcggggtgcaccccgactatggctcgctggccgacgcccggcggctggtgcgggcggcccacgcgcgcggcctgcgcgtcatcaccgagctggtcatcaaccacacctccgaccagcacccttggttccagcgcgcccgcgccgcgcggccgggttcggcgcaccgcgcctattacgtctggtcggacgacgacaaggcctatgccggcacgcgcatcatcttctgcgacacggaaaagtccaactggacctgggacccggtggccggcgcctatttctggcaccgcttctattcgcaccagcccgacctgaactacgacaatccgcaggtgctgcgcgaagtgctgggcgcgatgcgctactggctggacatgggcgtggacggcctgcgcctggacgcggtgccctacctggtcgagcgggaaggcaccaacaacgagaacctgccggaaacccacgccatcctgcggcgcatccgccgcgtcatcgacagcgagtatcccggcaggatgctgctggccgaggccaaccagtggcccgaggacgcgcaagagtacttcggcgccggcgacgaatgccacatggcgttccactttcccctgatgccgcgcatgtacatggccatcgcgcaggaggaccgcctgcccgtcaccgacatcatccgccagacgccgtccatcgcgccgcaatgccaatgggccattttcctgcgcaaccacgacgagctgaccctggagatggtgaccagccgcgaacgcgactacctgtggaacgtctacgcggccgagccgcgcgcgcgcatcaacctgggcatccggcgccgcctggcgccgctgctcgagcgcgaccggcgccgcatcgaactgatgaacagcctgctgctgtccatgccgggcacgccggtgctgtactacggcgacgagctgggcatgggcgacaacatccacctgggcgaccgcgacggcgtgcgcacgcccatgcaatggtcgcccgaccgcaacggcggcttctcgcgcgccgaccccgagcgcctgccgctgccgctgctgatggggccgctgtacggctacgaggcggtcaacgtggaggcgcagcagcgcgacccgcattcgctgctgaactggacccgccgcatgctggccaagcgccgccagagccatgtgttcggccgtggcgaactgtcgttcctgtatccgggcaaccgcaagatcctggcctatctgcgcacctgggaagacacggtggtgctgtgcgtggccaacctttcgcaggcggcccagccggtcgaactgcacctgtccgagtacgccggccgcgtaccggtggaaatgctgggcggcaccgcctttccgcagatcggcgagctgccctatctgctgacgctgccgcctttcggcttctactggctggacctgagcgccggcgccgcgccgcccgcgtggcacagcgagctgccgccgcaaatgccggaatcgatcaccctggtgtcgcgcggcgcgggcgcggcgctgcgcctgaccgaggcatcgcgccgccagctggaagcggacgtgctgccggcctacctgcagcggcagcgctggtatgccgcgcgccgcaagcccggagtcatgcggctggcctacagcgtgccgctgaacgacgacgtggaaagctattacgaagccgagatcgaagtcagcgacgacggaccgccgcgccgcttccatacgccggtggcgctggcctggcaggacgataccgccgcccagtatccgctggcgcgcgtgcggcgcggcgcgcagctgggcacgctcaccgacgcctcgctgcagcccggctatgcgcgcgtgctgctggcggccctgacggccggccgcgatatccaggccggcggcgagcccgccgtgcggctgcgcttcctgcccgagccgggcctggccgacctggcgctgcgcgatgacagcgaggtgcgcgcgctcagcgccgaccagtccaacagttcgctgctggtcggcgagcgcgtcgtgttcaagctgctgcgcgagctgcatgccggcccgcaccccgaagccgagatgacgcgctacctcacccaggccggctacgcgcatacgccggcgctgctgggcgaggtcgtgcgcgtgcagggcgaccaggcgccccatacgctggcgctggcccacgcctacgtcgtcaacgaaggcgatgcgtggaactggaccgtggcctacctgaagcgcacggtcgacgccgccatgctgaccggcgccagcgccgacgactaccagcaggaactggccggctacgaagtgctggccggcaccatcgggcaacgcctggctcagatgcactcggtgctggcgcgtgccggcgaactgccgggcttcgcgccgcggccggccagcgagcgcgacgccgccctggcgggcgagcacgcggtggcgcagctggaccgcgcgctgcaggccttgcgggcgtgcgagagcgggctcgcccctgcatcgcacgcctgcgcgcaatggctgttcgagcatcgcgaccggctggcggcccacatcatgacactggcgcaggccgaaaccggcgcgctgcgcatccgcgtgcacggcgacttccatctcggccagatcctggtcgcgcagaccgacgcctacctgatcgatttcgagggcgagccggcccggcccatggccgagcgccggcaactgagcagcccgttcaaggacgttgccggcatcctgcgctcgttcgactatgcggtggccgaactcagccgcgacgatccgctgggcggcgcgccgcgcgacttcaacaccggcgtggccgagccggccgacccggccagcgcgccccgggaaacgcgcgaggcgctgctggcgcgcttccggcagcgcgccggcgcggccctgctggccagctatggcaatgccatcgaccccgtgctggccttgccgcccgagcgtgcccaggcgcttacctgcctgtacctgctggagaaggccgcctacgaaatctgctacgagtcggcctaccggcccgagcgcctgccggtgcccatccatggcctggccgaaaccgcccgcgccgcgctgctggcggccgccgtcgaccacgatgaaggaccggcgccatga

SEQ ID NO: 138 - protein, 1113 aa, Bordetella bronchiseptica RB50
MPATHPAPDPLWYKDAVIYQLHVKSFFDANDDGVGDFAGLLAKLDYIVELGVNTIWLLPFYPSPRRDDGYDIADYRGVHPDYGSLADARRLVRAAHARGLRVITELVINHTSDQHPWFQRARAARPGSAHRAYYVWSDDDKAYAGTRIIFCDTEKSNWTWDPVAGAYFWHRFYSHQPDLNYDNPQVLREVLGAMRYWLDMGVDGLRLDAVPYLVEREGTNNENLPETHAILRRIRRVIDSEYPGRMLLAEANQWPEDAQEYFGAGDECHMAFHFPLMPRMYMAIAQEDRLPVTDIIRQTPSIAPQCQWAIFLRNHDELTLEMVTSRERDYLWNVYAAEPRARINLGIRRRLAPLLERDRRRIELMNSLLLSMPGTPVLYYGDELGMGDNIHLGDRDGVRTPMQWSPDRNGGFSRADPERLPLPLLMGPLYGYEAVNVEAQQRDPHSLLNWTRRMLAKRRQSHVFGRGELSFLYPGNRKILAYLRTWEDTVVLCVANLSQAAQPVELHLSEYAGRVPVEMLGGTAFPQIGELPYLLTLPPFGFYWLDLSAGAAPPAWHSELPPQMPESITLVSRGAGAALRLTEASRRQLEADVLPAYLQRQRWYAARRKPGVMRLAYSVPLNDDVESYYEAEIEVSDDGPPRRFHTPVALAWQDDTAAQYPLARVRRGAQLGTLTDASLQPGYARVLLAALTAGRDIQAGGEPAVRLRFLPEPGLADLALRDDSEVRALSADQSNSSLLVGERVVFKLLRELHAGPHPEAEMTRYLTQAGYAHTPALLGEVVRVQGDQAPHTLALAHAYVVNEGDAWNWTVAYLKRTVDAAMLTGASADDYQQELAGYEVLAGTIGQRLAQMHSVLARAGELPGFAPRPASERDAALAGEHAVAQLDRALQALRACESGLAPASHACAQWLFEHRDRLAAHIMTLAQAETGALRIRVHGDFHLGQILVAQTDAYLIDFEGEPARPMAERRQLSSPFKDVAGILRSFDYAVAELSRDDPLGGAPRDFNTGVAEPADPASAPRETREALLARFRQRAGAALLASYGNAIDPVLALPPERAQALTCLYLLEKAAYEICYESAYRPERLPVPIHGLAETARAALLAAAVDHDEGPAP

SEQ ID NO: 139 - DNA, 1452 bp, Prochlorococcus marinus str. MIT 9313
  CDS (1)..(1452): transl_table=11
atgcaatggggcatgcagcagatcgatgggctgaccaacactccccgctgggttgcccaggcggtggtgtatcagatcttccctgatcgttttcgttgtagtggccgtgtcttagctcatcagcatttggctttgcgctgctggggcagtgacccttctgagcagggttttcaggggggagatctctacggggtgatcgaggcccttgatcatctccaggcgcttggtatcagctgcctttacttgacacccgtctttagttctgccgctaatcatcgctatcacgcttatgactacttgcaggtggatccgcttctcggtggcaatgcagcgctagaggctttgattgaggcggtgcatcgccgcgggatgcgcatcattttggatggcgtgtttaatcactgtggtcgcgggttctgggcttttcatcatcttttggaaaatggtgaggcttcgccctatcgcgattggtttgaggtgcggcaatggccgcttcatccctatccacggcgtgggcaggattgtggttacagctgctggtggaacgatccagccttgccaaagttcaatcatgcccatgcccctgtgcgtgagtatttgattgccgtagcccgctattggctcgagcagggaatcgatggttggcgacttgacgttgctgatgaggtgcctgctgagttttggctggagtttcggcacatggttaaggcagtgaatccagacgcttggatcttggctgagatctggggtgatgcgagaccgtggctacaggggcagcactttgatggggtgatgaattatcggatgggttggagcagcctttgctgggttgctggtaagcgattacgccgtcggtatcgcaatcctgcctatccccttgaccctctgagtggggaggcttttgttgagctattggcaacaacgctgggttggtatcgacctgaggtgaaccgcagccagttgaacttgcttgatagccacgatgtgccgagagctttgcacacacttcagggggatcttgcggcgttgaagttggccttgctgttgttgtttttgcaaccaggggcgccttgcatctactacggcacagaggcgggtttgcagggtggccctgaaccaggttgccgagaagggttcccttggcatacgccttggcctgcagacctgcgcgatttcattcagtcgttgagtgatctgcgccaacgttgcccagcgttgagtgatggcggtttgcaatggcaaccgattggagctgatgcacttcatgcttggctgatgcagcccgagccaggcacaacacaaaaggagacgccgattcaggtgtgggtcaatcgcagtcgcaggtcatggttgcggatgaaaggctcatcgacagaccctctttggctggaaggagcattggaatgcaatggccggggattaggccctcaatcagcagtgttgtttcactga

SEQ ID NO: 140 - protein, 483 aa, Prochlorococcus marinus str. MIT 9313
MQWGMQQIDGLTNTPRWVAQAVVYQIFPDRFRCSGRVLAHQHLALRCWGSDPSEQGFQGGDLYGVIEALDHLQALGISCLYLTPVFSSAANHRYHAYDYLQVDPLLGGNAALEALIEAVHRRGMRIILDGVFNHCGRGFWAFHHLLENGEASPYRDWFEVRQWPLHPYPRRGQDCGYSCWWNDPALPKFNHAHAPVREYLIAVARYWLEQGIDGWRLDVADEVPAEFWLEFRHMVKAVNPDAWILAEIWGDARPWLQGQHFDGVMNYRMGWSSLCWVAGKRLRRRYRNPAYPLDPLSGEAFVELLATTLGWYRPEVNRSQLNLLDSHDVPRALHTLQGDLAALKLALLLLFLQPGAPCIYYGTEAGLQGGPEPGCREGFPWHTPWPADLRDFIQSLSDLRQRCPALSDGGLQWQPIGADALHAWLMQPEPGTTQKETPIQVWVNRSRRSWLRMKGSSTDPLWLEGALECNGRGLGPQSAVLFH

SEQ ID NO: 141 - DNA, 1407 bp, Synechococcus sp. WH 8102
  CDS (1)..(1407): transl_table=11
atggcgtcctccacgcccttccacgacccaccggcctgggtggcggatgccgtggtgtatcagatctttccggatcgattccgccgcagtggtcaggtgaaggctcagcaacatcttgagctgaagccctggggcagtgatccccgtgagcagggctttcaagggggggatctctacggggtgatcgaggcgttggatcagctgcaggccatgggcatcagctgcctgtacctcacgccgatcttcagctccgccgccaatcaccgctatcacgcctacgactatttcgaggtggatcccctgctgggggggaatgacgctctggatacgttgatcgcagccttacaccagcggggcatgcggctggtgctcgatggtgtgttcaaccactgcggccgtggcttctgggcctttcatcacctggtggaaaacggccaggactccccctaccgggattggttcaatgtgcaccgctggcctgtaaagccgtatccggccgagggcgaggactgcggctacgattgctggtgggctgtgcctgatctgcccaagttcaaccatgccaatcccgcagtgcgggaccatctgttggaggtgggtcgtttctggctggaacggggcatcgatggttggcgtctggatgtgcccgcggaagtgccagccgagttctgggtggatttccgtcgcgtggtgcgggaggtcaaccctgacgcctggatcgtgggtgagatctggggtgatgcccgggagtggctgcggggcgagcactttgatggggtgatgaattaccgcctcggctggagcagcctcggctgggtggcaggagatcggttgaggcagggataccgcaatccggagtacccactgaatcccctcagtagcgaggatttgatcgaaatctggagcaccacgtccggttggtaccgcccagccgtgaatcgagctcagatgaacctgctcgatagccacgatgttcctcgggcactccacagcctcgatggagatgtgaaggctctgaagctcgccctgctgctgatctttctgcagcaaggggccccatgcgtgtactacggcaccgaatctggattgtgcggtggcccggaacccgcctgtcgtgaagcctttccctggggtgaaccctggcctgcggatctgagctcaaccattgcggccttggctgatctccggcgaaatcaacccaatctcattcgcggcgatctgaagtgggagccgatcggacgcgacggactgctgggaagcacccctggcggtttaagcgtctgggttaaccgcagcaccacgacctcgctgcagattgatcctgggatttccagaatctggagttgtggcgcctgcgatggacaagctctagagccgcaatctgcagtggtgcatctgcagggataa

SEQ ID NO: 142 - protein, 468 aa, Synechococcus sp. WH 8102
MASSTPFHDPPAWVADAVVYQIFPDRFRRSGQVKAQQHLELKPWGSDPREQGFQGGDLYGVIEALDQLQAMGISCLYLTPIFSSAANHRYHAYDYFEVDPLLGGNDALDTLIAALHQRGMRLVLDGVFNHCGRGFWAFHHLVENGQDSPYRDWFNVHRWPVKPYPAEGEDCGYDCWWAVPDLPKFNHANPAVRDHLLEVGRFWLERGIDGWRLDVPAEVPAEFWVDFRRVVREVNPDAWIVGEIWGDAREWLRGEHFDGVMNYRLGWSSLGWVAGDRLRQGYRNPEYPLNPLSSEDLIEIWSTTSGWYRPAVNRAQMNLLDSHDVPRALHSLDGDVKALKLALLLIFLQQGAPCVYYGTESGLCGGPEPACREAFPWGEPWPADLSSTIAALADLRRNQPNLIRGDLKWEPIGRDGLLGSTPGGLSVWVNRSTTTSLQIDPGISRIWSCGACDGQALEPQSAVVHLQG

SEQ ID NO: 143 - DNA, 1662 bp, Synechococcus sp. WH 8102
  CDS (1)..(1662): transl_table=11
atgagccaaaccatgccgtggtggaccggcacggtcatctatcaactgatcgtgcgcagcttcgccgatggcaacggtgatggcatcggcgatttcaagggtctggcttcgcgcttgccctatctgcgctggctcggggtgaagacgctctggctgacacccacgtacccatctcccttacgggatggtggctacgacatcaccgacttcaaggacattcaccctgatctgggcgatctggcgtcgttccatcggtttctgacggcagcccacagccagggcatgcgcgtgattctcgatctggtgctgaaccacaccagcgaccttcacccctggttccagcgagcccgctgggcccccaagggcagcactgaacgggatgtgtacgtctggagcgacgacccatcccgctacagcgacgccccggtgctgttccggcactttgaagcgtccaactgggagtgggacccagtggcggagcagtactacctgcaccgtttcctgagccatcagcccgacctcaactacgccaacccgtgggtgcaggaggccatgctcgaggtggttgacttctggctggagcgtggggtcgacggctttcgccttgatgcggtgccgtttctgtttgaggaggagggcacccggtgtgaagggttgccggagacccatgccttcctgcggcgtctgcgggcccgtgtggatgccatgggacgagaggtgctgttgctgggggaagcgatccaacccgtgcaggaggcagccccctatctggcgaaggacgaactgcacggagccttcaacttcgtgctcacagcccatctgttcgctgctgtggcctccggcagcactcgccagctcggggactgtctcaacgaggcggaacacgcggttgatggcccgcgctgggccctgccgctccgcaaccacgacgagctctggctgggggatgggcacctgatccccgacgaggtgatccagtcgatccgggtgggcttgccccaggggcaggggcattggctcaactggggcatcaaccgtcgattggcaccgctgctcaatggcgacccccgctccaaccgactgcttcacggactgatttacagccttccaggcatgccctgcctgtattacggcgacgagctggggatgggggattggccggggttacgggatcgggatccgaaccgcacacccatggcctggacacctgcccgcaacggtggcttctcctcggctcccgaccctttgctggtgcttccgccgatcacagctcctgggtacgactaccgagtcgtgaacgttgaggtacagaaacagctgccgggttccttgctgaactggcaccgccgcatgctcacttgccggcgtttgctgccggccctcgcccatggatcattgcagctgttgccgtgcagccatcccggtgccttggtttacgtccgcgcgactgaggccatgacggtgttggtggcgggcaatgtcacggccgccggagcctccttcagcctggatctcacggcctgggagggcttgcggactcgcgaggtgatgtggggctgtgaattcccgctggccagccgcgaatggtttgtgaatctgtctccttacggcatcaactggtggttgatcggcgaggtggataccgctgtgcccgtgagctga

SEQ ID NO: 144 - protein, 553 aa, Synechococcus sp. WH 8102
MSQTMPWWTGTVIYQLIVRSFADGNGDGIGDFKGLASRLPYLRWLGVKTLWLTPTYPSPLRDGGYDITDFKDIHPDLGDLASFHRFLTAAHSQGMRVILDLVLNHTSDLHPWFQRARWAPKGSTERDVYVWSDDPSRYSDAPVLFRHFEASNWEWDPVAEQYYLHRFLSHQPDLNYANPWVQEAMLEVVDFWLERGVDGFRLDAVPFLFEEEGTRCEGLPETHAFLRRLRARVDAMGREVLLLGEAIQPVQEAAPYLAKDELHGAFNFVLTAHLFAAVASGSTRQLGDCLNEAEHAVDGPRWALPLRNHDELWLGDGHLIPDEVIQSIRVGLPQGQGHWLNWGINRRLAPLLNGDPRSNRLLHGLIYSLPGMPCLYYGDELGMGDWPGLRDRDPNRTPMAWTPARNGGFSSAPDPLLVLPPITAPGYDYRVVNVEVQKQLPGSLLNWHRRMLTCRRLLPALAHGSLQLLPCSHPGALVYVRATEAMTVLVAGNVTAAGASFSLDLTAWEGLRTREVMWGCEFPLASREWFVNLSPYGINWWLIGEVDTAVPVS

SEQ ID NO: 145 - DNA, 1863 bp, Gloeobacter violaceus PCC 7421
  CDS (1)..(1863): transl_table=11
atggcaatcaccatcgaagagaaagctccccgcaagctcagcgaagcggatctgcggccgcgcggccaagtgcatccgagcccggcaagctggcgcgatcagtttctctaccagctgttgccggaccgcttcagcgacggccgcgaggcggatcggccgctttttgacccggccgatccggcccgattccaggtcaaagacagaggagcctggatggcggcggggaagcgattcgtaggtggaaccctcaaaggcgtcatcagcaagctcgactatctgcaggggctcggggtgacgacgctgtggctcaacccaccctggaagcagcgagcggatctggagacttatcacggctacggtattcagaactttttcgacatcgatccgcgcttcgggacccgccaggatctgcgcgacttggtcgatgccgcccacgcacggggcctgtacgtcatcctcgatgtgatctataaccacagcggcaacaactggttctaccgagacgaatgggacggcagcccgcaatcgatgcgcccctaccgctatgcgcccggctatccggtgcacggttggcgctccggcgacgggcgcagcgtgggtgagattgtttctctcgacgacggcgtctggcccgaggagtttcaaaactttgactggtacacccgcgccgggcggatcatcaactggagcgaagcggcctgggaggattatctgagcccccaggtcgaatttcgccggggcgatttttttgatctcaaagacttcaacctggccaatcccgccaccatcgccggtttggcccgcgtctaccagtactggattgccctcagtgactgcgacggatttcgtgtcgatgcggtcaagcacgtctcccctgtcgaatcgcgcaagttctgcgcggccatcaacgagtatgcccagtcgatcggcaaggacaattttttgctcaccggtgaactcaccgacgaccgcatgctgcttgcctacctcgacatcgtcgggcgcaacctggatgcggccctcgacatcgtcagcgcgccgattcagctgaccgccgcagccaagggccttgctcacccgggcgccttcttcggtctttacgacgagaacaccctggcgggcgcctaccgccagagcgggctttatcatgtctcggtcctcgacgatcacgacatgtcctcgcgcagctacaaatcgcgctttgccgcccacggcgaaggggtgcccaacctttaccggcaggtggcccacgcggtcggcgtgcaactgacgatgcccggtattccttcgatttactacggcaccgaacaggccctggacggctccgagagcaaccacgactacggcatcgatgggtcgcacgaatatgtcgatcgctacgtgcgcgaagcgatgttcgggggtgcctttggtgcctttcgcaccgagggttgccactttttcaacccggatcaccctacctatctgcgcatcgccgccatcgcccgcctgcgcaaccgtctggacgccgtcggcaaaaccctgcgccgggggcatcactacctgcgggagacctcgtttgtccaccgaccctttgtcctcccgggggccggcgagctggtggcctggtcgcaaattctgttcgagacggaggcgctgatggtcctcaacacccacggcctggagaatcgaggtgccgaggtgaccgtcgagacctcgctgcacccggaaggttcgtcgatggccgtcctgtaccacagcgaatggagcgacgaccagctgcgtcagccgccgtcggctcagaccgtgcctgtcgagtatggccacggtcgcgccacggtgcgcatcgacctgcccccctgcggcatggtgattctgagctga

SEQ ID NO: 146 - protein, 620 aa, Gloeobacter violaceus PCC 7421
MAITIEEKAPRKLSEADLRPRGQVHPSPASWRDQFLYQLLPDRFSDGREADRPLFDPADPARFQVKDRGAWMAAGKRFVGGTLKGVISKLDYLQGLGVTTLWLNPPWKQRADLETYHGYGIQNFFDIDPRFGTRQDLRDLVDAAHARGLYVILDVIYNHSGNNWFYRDEWDGSPQSMRPYRYAPGYPVHGWRSGDGRSVGEIVSLDDGVWPEEFQNFDWYTRAGRIINWSEAAWEDYLSPQVEFRRGDFFDLKDFNLANPATIAGLARVYQYWIALSDCDGFRVDAVKHVSPVESRKFCAAINEYAQSIGKDNFLLTGELTDDRMLLAYLDIVGRNLDAALDIVSAPIQLTAAAKGLAHPGAFFGLYDENTLAGAYRQSGLYHVSVLDDHDMSSRSYKSRFAAHGEGVPNLYRQVAHAVGVQLTMPGIPSIYYGTEQALDGSESNHDYGIDGSHEYVDRYVREAMFGGAFGAFRTEGCHFFNPDHPTYLRIAAIARLRNRLDAVGKTLRRGHHYLRETSFVHRPFVLPGAGELVAWSQILFETEALMVLNTHGLENRGAEVTVETSLHPEGSSMAVLYHSEWSDDQLRQPPSAQTVPVEYGHGRATVRIDLPPCGMVILS

SEQ ID NO: 147 - DNA, 1443 bp, Gloeobacter violaceus PCC 7421
  CDS (1)..(1443): transl_table=11
atgcagattcacacaccgaactgggtaaagcacgctatcttctatcagatctttccggaccgcttctcccgcacccagcagttaaaacaaaagctgttgcaggcggtctccttcgaggattgggcagccgccccgaccctctacggctataaaggcggcgatctgtggggggtaatcgaaagactcgattacctgtcggatttgggcatcaacgccatctatttcactccgatatttcaatcggcgagtaaccaccgctaccatacccacgattactatagagtcgatccgctgctgggaggaaacgaggcgttcaaggcattgctcgatgccgcccacgcccgcgacatcaaagtggtgctcgacggtgtatttaaccacgcgagccgcggttttttcttcttccacgacatccttgaaaatggtcaactctccccgtggctcgactggttcaagatcgaaggctggcccctctcgccctacaatgtcgagcagcccgccaactatgcctgctgggacaacaaccgtgccctgccccagttcaaccatgccaatccgatggtgcgcgagtacattatggagattgccgaatactggatcaaagcgggtatcgacggctggcgcctcgatgtgcccgcctgtgtagaggcggaaggtttctggcaggaatttcgcgagcgcgtcaaggcaatcaatcctgaagcctacatcgtcggcgaaatctgggaggatgcccgccagtggctcgacggcacccagttcgacggggtgatgaattatctgtttgccgccccgaccatcgcctttacggccggggatcgcgtccaggtgcagtacgtgcaggaccgttcctacaggccctacccggcgctgttcgccgttgagtacaaagaggcaatcgacaaattgttggggctgtacgactgggagatccagctggcgcaactcaacttgctcgatagccacgacacggccagggtactgaccatcgccgggggcgaccgcgcgagtgtagaactggcgacactgctgttgctcacctttcccggggcgcccagcatctactacggcgacgaggtgggcctgcccggcggcatcgaccctgattcgcgccagggttttcctcccgaatcgcagtggaacggcgaactgctcgcgctgcaccgcgacttgatcgccctgcgccaccgccacgaagcgctgcgcatcggcaaatacaaaagcgtctatgcctccggccagtgctatgtcttcgagcgccgcctggaggcggaagtgctgttggtggccgtcaacgccgggaccgaaccggcgcgcgtcaccctcgaagcgcctggggaaacctacccgcgcaaagtgctcttcggtcccggccaggtggaagccgccgaagggcatctggaattgagcctgccggcccgcagcggtctggtgctggggtag

SEQ ID NO: 148 - protein, 480 aa, Gloeobacter violaceus PCC 7421
MQIHTPNWVKHAIFYQIFPDRFSRTQQLKQKLLQAVSFEDWAAAPTLYGYKGGDLWGVIERLDYLSDLGINAIYFTPIFQSASNHRYHTHDYYRVDPLLGGNEAFKALLDAAHARDIKVVLDGVFNHASRGFFFFHDILENGQLSPWLDWFKIEGWPLSPYNVEQPANYACWDNNRALPQFNHANPMVREYIMEIAEYWIKAGIDGWRLDVPACVEAEGFWQEFRERVKAINPEAYIVGEIWEDARQWLDGTQFDGVMNYLFAAPTIAFTAGDRVQVQYVQDRSYRPYPALFAVEYKEAIDKLLGLYDWEIQLAQLNLLDSHDTARVLTIAGGDRASVELATLLLLTFPGAPSIYYGDEVGLPGGIDPDSRQGFPPESQWNGELLALHRDLIALRHRHEALRIGKYKSVYASGQCYVFERRLEAEVLLVAVNAGTEPARVTLEAPGETYPRKVLFGPGQVEAAEGHLELSLPARSGLVLG

SEQ ID NO: 149 - DNA, 1635 bp, Vibrio vulnificus YJ016
  CDS (1)..(1635): transl_table=11
atggaaaacaaatggtggcacgatgcggtggtctatcaaatctacccgcgtagtttttgcgattcaaacaacgacggcatcggcgatttaaatggcatcatcagcaaactcgattacctgaaaacacttggcgtaaacgtgctttggctctcgcccgtatataagtcgcctatggatgacaacggttacgacatttctgattatcaagatatcgctgcggaatttggcaccatggctgatatgcaaaacttacttgatcaagcaaaagcgcgtgatatccgcatcgtaatggatcttgtcgtcaaccatacctcagatgaacacccttggtttgtagaagctcgtaaatcaaaagacaacccttatcgtgactactatatttggcgtgatgcaaaaccagatggcagtgtgcccgatgaccaaggttcgatttttggaggcagtgcttggcaatgggatgaagcaacacaacagtattacttccatctattttctaagcgacagccggatctcaattgggagaatcctaaagtccagcaggaagtacacaagatgatgaactggtggattgaccaaggcatcggtggatttaggctcgacgttatcgacttgattggcaaagagatcgacaaaggcattactggtaatggcccaaggctgcatccactattgcaggaaatgaacagagcgacgtttggcgacaaagatctgctgaccgttggtgaaacatggggagcaaccccagaaattgcaaaattgtatagcgatcctgagcgtcatgaactctccatggtgttccaatttgagcacatcacgctcacttggcaacacggtgacaaatggaaccctattcctcttgatctcaaacaattcaaacacgtactgaccaagtggcaaactgaattatcgaaccaaggttggaactcgttgttttggaacaaccacgatttaccacgcgtagtctcgaaatacggtgatgaccaacgctatcgtgttgagtcagcgaaaatgctggcaacggcgttgcatttcctcaaaggcacgccttacgtctaccaaggtgaagagatcggtatgaccaatgtcgcgtttgagtcgttagagcaatacaaagacattgaaacgctgaacttctacaaagtgaaaacagaatcaggggtgtcacatcaacatatgatggacgcgatacatgagaacagccgtgacaatgctcgcaccccaatgcagtggtccgcatctcagaatggtggctttagtcaggcgaaaccttggattgaagtgaatccgaactatccagagatcaacgtggaacaagcattggcagattcagattccattttctatcactaccaaaagctgattgaactgcgcaaacagcacccagcgatcgtctatggcgatttcaccccactgtttgcagagcacgatagtgtgtttgcttatgtccgctcacatcaagatgagcaactgctggtcatcaacaactttagcgatcaagatgtttcattagcgttgccggataacttgcaaaacaaagaagttaactgtctgatttataactacgattcgttggatatgctcggagtgacattgtcactaaaaccgtatcagtgctacgcatttaaacttagataa

SEQ ID NO: 150 - protein, 544 aa, Vibrio vulnificus YJ016
MENKWWHDAVVYQIYPRSFCDSNNDGIGDLNGIISKLDYLKTLGVNVLWLSPVYKSPMDDNGYDISDYQDIAAEFGTMADMQNLLDQAKARDIRIVMDLVVNHTSDEHPWFVEARKSKDNPYRDYYIWRDAKPDGSVPDDQGSIFGGSAWQWDEATQQYYFHLFSKRQPDLNWENPKVQQEVHKMMNWWIDQGIGGFRLDVIDLIGKEIDKGITGNGPRLHPLLQEMNRATFGDKDLLTVGETWGATPEIAKLYSDPERHELSMVFQFEHITLTWQHGDKWNPIPLDLKQFKHVLTKWQTELSNQGWNSLFWNNHDLPRVVSKYGDDQRYRVESAKMLATALHFLKGTPYVYQGEEIGMTNVAFESLEQYKDIETLNFYKVKTESGVSHQHMMDAIHENSRDNARTPMQWSASQNGGFSQAKPWIEVNPNYPEINVEQALADSDSIFYHYQKLIELRKQHPAIVYGDFTPLFAEHDSVFAYVRSHQDEQLLVINNFSDQDVSLALPDNLQNKEVNCLIYNYDSLDMLGVTLSLKPYQCYAFKLR

SEQ ID NO: 151 - DNA, 3303 bp, Rhodopseudomonas palustris CGA009
  CDS (1)..(3303): transl_table=11
atgaataaaatgacatcgatcgccccgagcgacagaccggacgcggaaacttccgacgaactctggtacaaagacgccatcatctaccagttgcacgtcaaggcgttcgccgacagcaacaatgacggcatcggcgacttcgcgggtctcaccgagaagctggattatctgcaggagctcggcgtcaacacgctgtggctgctgccgttctatccgtcgccgcagcgcgacgacggatacgacatcgccgactacggatcgatcaatcccgacttcggcacgatgaaggacttccgccgcttcatcgtcgaggccaagaagcgcaatctccgggtcatcaccgagctggttatcaaccacacctcggatcagcacgcctggttcaagcgggcgcggcgcagcccgaaagactccagcgcgcgcgactggtacgtctggagcgacaccgaccagaaatatctcggcacccggatcattttcaccgacaccgagaaatcgaactggacctgggatcccgaggccggccagtattactggcaccggttcttctcgcaccagcccgatctcaacttcgacaatccgcgcgtcgtcagcgccgtggtcaaggtgatgaaacgctggctcgacaccggcgtcgacggcttccggctcgacgcgatcccgtatctgtgcgagcgcgacggcaccaacaacgagaaccttcccgagacccacgccgtcatcaagcggctgcgcgccgagctcgacgcctacgccaagggcaagctgctgctcgccgaggccaaccaatggccggaggacgtgcagcagtatttcggcgatggcgacgagtgccacatggcctaccacttcccgctgatgccgcggatctatatggcgatcgcgcaggaagaccgcttcccgatcaccgacatcatgcggcagacgccggagattcccgcgaactgtcagtgggcgatgttcctgcgcaaccacgacgagctgacgctcgaaatggtcaccgacgtcgagcgcgactatctgtggaagacctacgcggccgatccgcgagcgcggatcaacgtcggcatccgtcgccgcctcgcgccgctgatggacaatgatcgccgcaagatcgaactgatgaactcgctgctgatgtcgttccctggcacgccgatcatctactatggcgacgaaatcggcatgggcgacaacatctatctcggcgaccgcaacggcgtgcggacgccgatgcagtggtcgcccgaccgcaacggtgggttttcgcgggccgacccggcacggctgtacgcaccgccgatcatggaccccgtgtacggctacgcctcggtcaacgtcgaagcccagcagcgcagcctttcgtcattgctgagcgcgatgaagcgcttgatcgcggtgcgcaaatcgacgccggcgttcggccgcggcagcatcaccttcatccgtccgagcaaccgcgcggtgatcgcctacgttcgccaatacaaggacgaggtcattctgtgcgtcgccaatctgtcgcgtgccgcgcaggcgaccgaactcgacctgtcgccgtggaaggaccgcgtgccgcaggagatgctcggccgcaccaaattcccgccgatcggcgatccggcctacatgatcacgctggcgcccttcggcttctactggttcaagctgcaggagcccggcacggctgcgcatgtcgcgccggtctccaccgtgcctgaattcgtcacgctggtggtgccgctcggttcgacctggatgacgctcggccgcacccgctcgatgttcgagcacgaggtgctgccgaccttcctgtcccgcacccgctggtttccggagcgcaatccgcgggcgatccatccgcggctcacctcggcgattccgttcgccaatgacggcgacaaccgtccgtggctggcgttcttcgaggccacgcagcgggggacgacggcgcgctatctgctgccgatgcagatcgactgggtgcggttcgaccgcgaacgctacaatccgcgggcctatgcggcggtgcgccagggcgcccgcgaaggtaccctgctcgatgtcgccgccgatccctcgttcatcgacctgctgctggagaacgtccgcgacgccgtcaccgtgaccggcgataacggcgaccgactggaattccgccctgggtccaagctcgcggaacggcccgccgggccattccagaacattcgcgcggtcgaaaccgagcagtcgaattcgaccgcactggtcgacggcgactacgtcgtcaaactgtatcggcggctgcagatcggcatcaatcccgagctggagatgggacgcttcctcaccgaggtcgccggctatgccaacaccccggccctgctcggcagcgtcgagctgatcgaaggcgacaagaccagcgcggtcgcggtggtgcacgaatttgcccgcaatcagggcgacggctggaccgtcacctccggctatctcgatcgctacatcgacgaacaacgcgtgctgagccgcgccgaggaaaagaccgagagcgatcagctcgcgccctatctgcatttcatgcagcagaccggcaagcgggtcgcggagatgcacatcgcgctcgccagccatcccgaggtgccggacttcgccccggagccgatcaccctcgacgcctcgcgcgactgggccgaaaccgttgcggcatccgccgaccggatgctcgacgaactgcggcgccggcgcgacacgctgaaggaaggcgaccggacgctggtcgacgaactgctggcggcccgcgacgtgctgatgtcccgcatccacggcctgctcggcgacgacggcggcctgaacatccgccatcacggcgacttccatctcggacagatgttgatcgtcaaggacgacatctacatcatcgacttcgaaggtgagccgcgccgcaccttggacgaacgccgcgccaaagcaccggcggctcgcgacgtggctgggctgatccggtcgatcgactattcgacgaccgccgcactcgagcgagcgctgaaagcagcctccgacgagccaggccgactgaccgaggcgctcgacctgtggcggatccgcgccacaggcgcgttcctggacgcctatcgccaaaccatgggcgacagcccggtgtggccggcggatatcgcggccgccgaccgggtgctcgacttcttcctgattgaaaaggcgctgtacgagatcgactacgagatcgcgcatcgtcccgactgggtgcatgtgccgctggtcggcattctccgtatcctgtcgccgcctcccgaggagcttccatga

SEQ ID NO: 152 - protein, 1100 aa, Rhodopseudomonas palustris CGA009
MNKMTSIAPSDRPDAETSDELWYKDAIIYQLHVKAFADSNNDGIGDFAGLTEKLDYLQELGVNTLWLLPFYPSPQRDDGYDIADYGSINPDFGTMKDFRRFIVEAKKRNLRVITELVINHTSDQHAWFKRARRSPKDSSARDWYVWSDTDQKYLGTRIIFTDTEKSNWTWDPEAGQYYWHRFFSHQPDLNFDNPRVVSAVVKVMKRWLDTGVDGFRLDAIPYLCERDGTNNENLPETHAVIKRLRAELDAYAKGKLLLAEANQWPEDVQQYFGDGDECHMAYHFPLMPRIYMAIAQEDRFPITDIMRQTPEIPANCQWAMFLRNHDELTLEMVTDVERDYLWKTYAADPRARINVGIRRRLAPLMDNDRRKIELMNSLLMSFPGTPIIYYGDEIGMGDNIYLGDRNGVRTPMQWSPDRNGGFSRADPARLYAPPIMDPVYGYASVNVEAQQRSLSSLLSAMKRLIAVRKSTPAFGRGSITFIRPSNRAVIAYVRQYKDEVILCVANLSRAAQATELDLSPWKDRVPQEMLGRTKFPPIGDPAYMITLAPFGFYWFKLQEPGTAAHVAPVSTVPEFVTLVVPLGSTWMTLGRTRSMFEHEVLPTFLSRTRWFPERNPRAIHPRLTSAIPFANDGDNRPWLAFFEATQRGTTARYLLPMQIDWVRFDRERYNPRAYAAVRQGAREGTLLDVAADPSFIDLLLENVRDAVTVTGDNGDRLEFRPGSKLAERPAGPFQNIRAVETEQSNSTALVDGDYVVKLYRRLQIGINPELEMGRFLTEVAGYANTPALLGSVELIEGDKTSAVAVVHEFARNQGDGWTVTSGYLDRYIDEQRVLSRAEEKTESDQLAPYLHFMQQTGKRVAEMHIALASHPEVPDFAPEPITLDASRDWAETVAASADRMLDELRRRRDTLKEGDRTLVDELLAARDVLMSRIHGLLGDDGGLNIRHHGDFHLGQMLIVKDDIYIIDFEGEPRRTLDERRAKAPAARDVAGLIRSIDYSTTAALERALKAASDEPGRLTEALDLWRIRATGAFLDAYRQTMGDSPVWPADIAAADRVLDFFLIEKALYEIDYEIAHRPDWVHVPLVGILRILSPPPEELP

SEQ ID NO: 153 - DNA, 1617 bp, Rhodopseudomonas palustris CGA009
  CDS (1)..(1617): transl_table=11
atggaaagcgtgacgagcgtgtcgtggtgggcggcgggtgtgctgtaccagatctatccgcgctcgtttcaggacagcaacagcgacggcatcggtgatctgcgcgggatcatcgatcggctcggctatctgtccgatctcggcgtcgacgcgatctggctgtctccgatctttccgtcaccgatggcggactttggctacgatgtcgccgactatgtcggcatcgatccaatcttcggcacgatggacgatttcgacgcgctggtgctcacggcccatgcccgcgggctcaaggtcattctcgatctggtgccgaaccattcatccgaacagcatccctggttcatcgagagccggtcgtcgcggcacaaccccaagcgcgattggtacatctggcgcgaccccgcaccgggcggcggaccgccgaccaattggctgtcggaattcggcggcagcggctgggagtacgacgacgcgaccgggcagtattactatcacgcctttctgaagcagcagccggacctcaactggcgcaatccggaggtgcgggccgcgatctatgacgcgatgcggttctggctgcggaagggcgtcgatggcttccgggtcgacgtgatctggcacctgatcaaggacgaccaatttcgcgacaacccgcccaatccggattttcgccccggcatgccgccgcacgccgcgctgatcccgatttactccgcggatcggccagagacgttggaggtggttgccgagctgcgccgtgtcgtcgacgaattcgatcatcggctgctgattggcgagatctatctgccggtggagcggctggtcgcgtattacggagcggagctgaagggtgcgcagctgcctttcaacttcgcgctgctgtcgacgccgtggcgcgcccgggagattgcgacgctgatcgaacgctacgagcaggcgttgccggccggcgcgtggccgaattgggtgctgggcaatcacgaccggccgcgggtggcgagccgggtcgggccggcacaggcccgcgtcgccgcgatgctgctgctgacgctgcgcggcactccgacgatgtattacggcgacgagctcggcatggagcaggtcgagatcgcgcccgaggacgtgcaggatccgttcgagaagaacgtacccggcatcggtgtcggccgcgatggctgccgcacgccgatgcagtgggacgcgtcggaccaggccggattctcggatgtccggccgtggctgccgctggccccgaacgccacccaggataacgtcgctaatctgcgcgccgacgcgcagtcgatcctaaacctctatcgcgctctgctgcggctgcggcgcgcgctgccccagctggcgctcggcgcttaccagccgctcgcggcggagggcgagctgttgctgtatcgccggcatcatcaggggcagtcgatcttggtggcgctcaatcttggcccggatccgatctcggcggcgtccgacgcgatcgggctcgacggcgaggtgctgctgtcgaccatgctcgatcgcgccggcgaacgcatcggtgccacgctcgacctgcgcggcaacgaaggcatcatcgtcggccgggcgccggaggacgtggtttag

SEQ ID NO: 154 - protein, 538 aa, Rhodopseudomonas palustris CGA009
MESVTSVSWWAAGVLYQIYPRSFQDSNSDGIGDLRGIIDRLGYLSDLGVDAIWLSPIFPSPMADFGYDVADYVGIDPIFGTMDDFDALVLTAHARGLKVILDLVPNHSSEQHPWFIESRSSRHNPKRDWYIWRDPAPGGGPPTNWLSEFGGSGWEYDDATGQYYYHAFLKQQPDLNWRNPEVRAAIYDAMRFWLRKGVDGFRVDVIWHLIKDDQFRDNPPNPDFRPGMPPHAALIPIYSADRPETLEVVAELRRVVDEFDHRLLIGEIYLPVERLVAYYGAELKGAQLPFNFALLSTPWRAREIATLIERYEQALPAGAWPNWVLGNHDRPRVASRVGPAQARVAAMLLLTLRGTPTMYYGDELGMEQVEIAPEDVQDPFEKNVPGIGVGRDGCRTPMQWDASDQAGFSDVRPWLPLAPNATQDNVANLRADAQSILNLYRALLRLRRALPQLALGAYQPLAAEGELLLYRRHHQGQSILVALNLGPDPISAASDAIGLDGEVLLSTMLDRAGERIGATLDLRGNEGIIVGRAPEDVV

SEQ ID NO: 155 - DNA, 3336 bp, Geobacter sulfurreducens PCA
  CDS (1)..(3336): transl_table=11
atggctcgcaggacaccgctgtcggacgacacccccctctggtaccgggacgccgtcatctaccaactccacgtgaaggccttcgccgattccgacggcgacggcgtgggggacttccggggcctcatggggaagctcgattatctccagtccctggggatcaccgccatctggatacttcccttctacccgtcccccttgcgcgacgacggctacgacattgccgactactacaacgtcaaccccagctacaacaccctgcgcgaattccgggaattcctcagggaggcccatgcccgccgcatccgggtcatcaccgagctggtcctcaaccacacctcggaccagcacccctggttccagcgtgcccgccgggcaaaaccgggctcggtccaccgggactactacgtctggagcgatacccccgaccggtaccgggaaacccggatcatcttccaggacttcgagacgtccaactggagttgggacccggtggccaaggcctactactggcaccggttctattcccaccagcccgacctcaatttcgacaacccccgggtccagtcggaagtgctccggatcatcgactactggctggggatgggtgtggacggcgtccggctggatgccgtcccctacctcttcgagcgggaaggaaccaactgcgaaaacctgcccgaaacccatgacttcctgaaaaggctccggggacacatggacgcctcgttccccaaccggatgctgctgggcgaggccaatcaatggcccgaggacgcggtggcctatttcggcgagggggacgagtgcaacatgctcttccacttcccgctgatgccccgcatgtacatggccatcgagatggaggaccgcttcccggtggtcgacatcctcgaccagacccccgcgatccccgagggatgccagtgggccatctttctccgcaaccacgacgagctgaccctggagatggtgaccgacgaggagcgggactacatgtaccggatctacgcctcggaccccaaggccaggatcaacctgggaatccggcggcggctggcgcccctcctcggcaaggaccggcggcggatcgaactcatgaacgccctgctcttctccctgcccggcacccccgtcatctactacggcgatgagatcggcatgggggacaactactacctgggggaccgcaacggcgtccgtacccccatgcagtggagccccgaccgcaatgccggtttttccggcgccaacccccagcgcctcttcctgccggtcatcatcgatcccgaataccactacgaagcggtaaacgtggacatccaggagcgcaaccccacctcgctgctctggtggatgcggcgcatcatcgccgtgcgccgccgctaccgggccttcagccgcggcgccatggagatgctctatccggccaaccacaaggtcctggcctttctccgccgccacgaggatgaagtgatcctcgtggtggtcaacctctcccgcttcgcccaggccatcaacctggaccttcaggaattcgccggcatatcccccgaagacctcttcagccggaatcgcttcccggtcatccgcgaagccacctatcccctcaccctgggcccccacgaccacttctggttcctgctgcggcgcagggaagcgccgcttcaggccgaggaagaactgccgcggatcaggcttcggggagaactcccctggtgggagactctccgccagaccaggggcgacgctcacctggaacgggtgaccaccgattacctcaagcgaagcggttggttccggggaaaagcgagggcaatcatcggctacgtgctgcgcgacaccgtgctcctgcggcagggggaacgggtgttccccatcttcttccttgaggtacgctaccaggacggcccgccggaaacctacctgattcccgtggcgttcctcaccggtgccggagcgaaacgggtaagcgccgaatccccccgggcggccatagccgctctttccgtgggggacgaagagggcattctctgcgatgcggtccatgaccgggaattcagggacgcgctccttgccctggcactcggccgtcgccggctccatggcgaggaaaacagtctcatcgtgccggttcacgccggagcaggacgcatcggctccagggaagagatgcgtcatctcgcctccgaactccccaaggcggaacagaccaacagcatcatcacctacggcgatcgccacgtgctcaagctctaccgcaaggtggagccgggcatcaattccgaggtggagatggcgcggttcctcaccgcaaaatcgagctaccccaacgttgcccccttccaggggagcctggaattgcggcatcccggcgtcgagccgggcgctatcggcctgctccagggatacgtacagaaccagggcgacggctggcgactctccctccacctcctgggccagtacttcgagcggattctctcgtgccggggcgagctgccaccgccgccgtcgcgtttttcgagcctcatggacggcagcgcctgcaccgtgccggaaccggcggcggagctcatcggcggcttttatttggagatggctggacttctcggccgccggaccgccgagctccacttggccctcgccgccgggggaaacgacccggcttggcggcccgaggagtattccaccctctaccagcgctccgtgtaccagtccatgcgcaaccaggcccgacgcagcctccagctcctggcccagcaccacaaggacctgcccgcagaggcgttggcatcggccgacaggattctgagcgcggaaaaggaacttctcgcctgtctgcgtcccatcgtcggccggcggattcaggccatgaagagccgcatccacggcaacttcaggttggaaaaggttctcttcaccggcaaggacttcatgataatcgacctggagggcgagccggaccggcccctcggcgagcgccgcatcaaacgctcccccctgcgggatgtggcgggaatgatccgctccttccacaacgccaccctgacggcccttgcccgccacggcgctggccatcccggcgacatcccgctcctggagccctgggcggaggcctgctggtatcacgtgagctgccgctatctggccggctacctggagcagatgggcacaagccccctcgtcccgacggagcggagcgacctcgagaccctcctccgctcgttcctgctggacaatgccctccacgaactcggctatgccctcgccaaccgccccgaacgggtttcctcttacctgcgcggggtcgagacggtgctgcgggagttccggtaa

SEQ ID NO: 156 - protein, 1111 aa, Geobacter sulfurreducens PCA
MARRTPLSDDTPLWYRDAVIYQLHVKAFADSDGDGVGDFRGLMGKLDYLQSLGITAIWILPFYPSPLRDDGYDIADYYNVNPSYNTLREFREFLREAHARRIRVITELVLNHTSDQHPWFQRARRAKPGSVHRDYYVWSDTPDRYRETRIIFQDFETSNWSWDPVAKAYYWHRFYSHQPDLNFDNPRVQSEVLRIIDYWLGMGVDGVRLDAVPYLFEREGTNCENLPETHDFLKRLRGHMDASFPNRMLLGEANQWPEDAVAYFGEGDECNMLFHFPLMPRMYMAIEMEDRFPVVDILDQTPAIPEGCQWAIFLRNHDELTLEMVTDEERDYMYRIYASDPKARINLGIRRRLAPLLGKDRRRIELMNALLFSLPGTPVIYYGDEIGMGDNYYLGDRNGVRTPMQWSPDRNAGFSGANPQRLFLPVIIDPEYHYEAVNVDIQERNPTSLLWWMRRIIAVRRRYRAFSRGAMEMLYPANHKVLAFLRRHEDEVILVVVNLSRFAQAINLDLQEFAGISPEDLFSRNRFPVIREATYPLTLGPHDHFWFLLRRREAPLQAEEELPRIRLRGELPWWETLRQTRGDAHLERVTTDYLKRSGWFRGKARAIIGYVLRDTVLLRQGERVFPIFFLEVRYQDGPPETYLIPVAFLTGAGAKRVSAESPRAAIAALSVGDEEGILCDAVHDREFRDALLALALGRRRLHGEENSLIVPVHAGAGRIGSREEMRHLASELPKAEQTNSIITYGDRHVLKLYRKVEPGINSEVEMARFLTAKSSYPNVAPFQGSLELRHPGVEPGAIGLLQGYVQNQGDGWRLSLHLLGQYFERILSCRGELPPPPSRFSSLMDGSACTVPEPAAELIGGFYLEMAGLLGRRTAELHLALAAGGNDPAWRPEEYSTLYQRSVYQSMRNQARRSLQLLAQHHKDLPAEALASADRILSAEKELLACLRPIVGRRIQAMKSRIHGNFRLEKVLFTGKDFMIIDLEGEPDRPLGERRIKRSPLRDVAGMIRSFHNATLTALARHGAGHPGDIPLLEPWAEACWYHVSCRYLAGYLEQMGTSPLVPTERSDLETLLRSFLLDNALHELGYALANRPERVSSYLRGVETVLREFR

SEQ ID NO: 157 - DNA, 1335 bp, Mycobacterium avium subsp. paratuberculosis str. k10
  CDS (1)..(1335): transl_table=11
gtggccagtgtcgtgaccggacccgactgggtccagcacgtcatctggtggcaggtctacccgctggggttcgtcggcgcgtacccgctaccgcagtccagcgagccgccgcaaccggaacaacaccggttgcggcggctcgtcgactggttcgaccacgcgatcgaactcggcgcctccggcatcgccctgggcccgatcttcgcctcccggacccatggctacgacaccaccgaccactaccgcatcgatccccggctcggcgacgacaccgacttcgaccacctcatcgcgcaagcgcaccggcgcggcctgcgggtgctgctcgacggcgtgttcaaccacgtcggtgtggacttcccgcggtatcgcgccgccatcgactctgacgatcacgccgccgcccgctggtttcgcggtagtcgcgggcgttttcacaccttcgagggccacgacggcctgatcaccctcaaccacgacaatcccgaggtcgtcgactacaccgtcgacgtcatggcgcactggctgggacgcggcgccgacggctggcgtctggacgcggcttacgctgtgccggaaacgttttgggcggccaccctgccccgggtgcgcgaccgctacccgcaggcctggttcgtcggcgaattgatccacggcgactacgccgcggtggtgcgggccgccggcttcgactctgccacccagtacgagctgtggaaggcgatctggagcagcctcaacgacggcaacttctatgaactggactgggcgctgcagcggcacaacgcatttctgggccggttctcgccgctgaccttcatcggcaaccacgacgtcacccggatcgccagccagctgaacaaccccgcgcacctggcgcacgccctggtgctgctgctgacggtcggcggggtgcccagcgtgtacgccggcgacgagctcggctttcgcggggtcaaggaggaacggttcggcggcgacgacgcggtacggcccgagttcggctctcccccaataccattggatgacttcggcacagaggtgtggaggctgcaccaatacctgatcgggctgcgccgccgccatccctggctgcacggggccaccaccaccgcgctgctgctgcaaaaccggcactacgtgtacgagacccgcagcggcgatgaggccctgctgatcgtgctcaacatcggcgatgagccgctgcgggtttcgctccgcgagctgggcggccggcgcgggcgggtgatcggcggctcggcggccccaccgccggaggtgctcgacacggtggtcgtcgagccgcagggctggcggatcctgagcccgatttag

SEQ ID NO: 158 - protein, 444 aa, Mycobacterium avium subsp. paratuberculosis str. k10
MASVVTGPDWVQHVIWWQVYPLGFVGAYPLPQSSEPPQPEQHRLRRLVDWFDHAIELGASGIALGPIFASRTHGYDTTDHYRIDPRLGDDTDFDHLIAQAHRRGLRVLLDGVFNHVGVDFPRYRAAIDSDDHAAARWFRGSRGRFHTFEGHDGLITLNHDNPEVVDYTVDVMAHWLGRGADGWRLDAAYAVPETFWAATLPRVRDRYPQAWFVGELIHGDYAAVVRAAGFDSATQYELWKAIWSSLNDGNFYELDWALQRHNAFLGRFSPLTFIGNHDVTRIASQLNNPAHLAHALVLLLTVGGVPSVYAGDELGFRGVKEERFGGDDAVRPEFGSPPIPLDDFGTEVWRLHQYLIGLRRRHPWLHGATTTALLLQNRHYVYETRSGDEALLIVLNIGDEPLRVSLRELGGRRGRVIGGSAAPPPEVLDTVVVEPQGWRILSPI

SEQ ID NO: 159 - DNA, 1773 bp, Mycobacterium avium subsp. paratuberculosis str. k10
  CDS (1)..(1773): transl_table=11
atgaacgacgcaagagaagctgtcgaacaccatcccgaggaaggcagtcacgtccaggacggtgtcgtcgagcaccccgaggccgaggacttcgacaacgccgccgcgctgcccaccgacccgacgtggttcaagcacgccgtgttctacgaggtgctggtccgcgcgttcttcgacgccaacgccgacggcgccggcgacctgcgcggtctgctggcgcagctggactacctgcagtggctgggcatcgactgcatctggctgcccccgttctacgactcgccgctgcgcgacggcggttacgacatccgggatttctacaaggtgctgccggagttcggcacggtcgaggatttcgtggcgctgctcaacgccgcgcacgagcggggcatccgggtgatcaccgacctggtgatgaatcacacgtcggagtcgcacccctggttccaggagtcccggcacgaccccgacggaccgtacggcgacttctacgtgtggagcgacaccagcgaccgctacgccgatgcccgcatcatcttcgtcgacaccgaggagtccaactggacgttcgacccggtgcgccgccagttttactggcaccggttcttctcccaccagcccgacctgaactacgacaacccggccgtgcaggaagccatgatcgacgtgatccggttctggctcgggctgggaatcgacgggttccggctggacgcggtgccctacctgttcgagcgggagggcaccaactgcgagaacctgccggagacgcacgccttcctcaagcgggtccgcaaggtcgtcgacgacgagttcccgggccgggtgttgctggccgaggccaaccagtggccggccgacgtggtcgagtatttcggcgaccccagcaccggcggcgacgaatgccacatggcgttccacttcccgctgatgccgcgcatcttcatggccgtgcgccgcgagtcgcgattcccgatctcggagatcctggcccagacgccgcagatccccgagatggcgcagtgggggatcttcctgcgcaaccacgacgagttgacgctggagatggtcaccgacgaagagcgcgactacatgtacgccgagtacgccaaggatccgcggatgaaggccaacgtcggcatccgccgccggctggcgccgctgctggacaacgaccgcaaccagatcgagctgttcaccgccctgctgctgtccctgcccggctcgccggtgctctactacggcgacgagatcggcatgggcgacgtgatctggctgggggatcgcgacggggtgcgcacgccgatgcagtggacgccggaccgcaacgccggcttctccaaggccaaccccggccggctgtatctgccacccagccaggacccggtgtacggctaccaggcggtcaacgtggaggcgcaacgcgacacctcgacgtcgctgctcaacttcacccgcaccatgctcgccgtgcggcgccggcacgaggccttcgcgatcggcacgttcgaggagctcggcggatccaacccgtcggtgctggcgttcgtgcggcaggtgtccaacgacggggacaccgtgctgtgcgtcaacaacctgtcgcggttcccgcagccgatcgagctgaatctgcagcactggagcgggtgcatcccggtcgagctgaccgggcacgtggaattcccccgcatcgggcacctgccctacctgctgacgctgccggggcacggtttctattggttccagctgaccgcatgcgaggaggacacatga

SEQ ID NO: 160 - protein, 590 aa, Mycobacterium avium subsp. paratuberculosis str. k10
MNDAREAVEHHPEEGSHVQDGVVEHPEAEDFDNAAALPTDPTWFKHAVFYEVLVRAFFDANADGAGDLRGLLAQLDYLQWLGIDCIWLPPFYDSPLRDGGYDIRDFYKVLPEFGTVEDFVALLNAAHERGIRVITDLVMNHTSESHPWFQESRHDPDGPYGDFYVWSDTSDRYADARIIFVDTEESNWTFDPVRRQFYWHRFFSHQPDLNYDNPAVQEAMIDVIRFWLGLGIDGFRLDAVPYLFEREGTNCENLPETHAFLKRVRKVVDDEFPGRVLLAEANQWPADVVEYFGDPSTGGDECHMAFHFPLMPRIFMAVRRESRFPISEILAQTPQIPEMAQWGIFLRNHDELTLEMVTDEERDYMYAEYAKDPRMKANVGIRRRLAPLLDNDRNQIELFTALLLSLPGSPVLYYGDEIGMGDVIWLGDRDGVRTPMQWTPDRNAGFSKANPGRLYLPPSQDPVYGYQAVNVEAQRDTSTSLLNFTRTMLAVRRRHEAFAIGTFEELGGSNPSVLAFVRQVSNDGDTVLCVNNLSRFPQPIELNLQHWSGCIPVELTGHVEFPRIGHLPYLLTLPGHGFYWFQLTACEEDT

SEQ ID NO: 161 - DNA, 1725 bp, Lactobacillus johnsonii NCC 533
  CDS (1)..(1725): transl_table=11
atgcaacttgcagctttaaaacacagaactgaaagtgaaaattgttttgttattgatcattcacacgttaaaattagacttcatacggcaaaagatgatgtggaaaaagtaattgttcattacacggataactatctcccaccaaaacaagctaaagaacttgaaatggagaaaataggtagtggtcaagttaatgattactggggagcaaccttaactgctccatatcaccgaattaaatatacttttgaagtgataggcaaagacggaagtcatgtgatcttcggtgatcgtagtattgaaaaatttagcgataaaaagttaagagaagatggaatgtattttaaagttccgtacttccatgatattgatcgcatcaagactccaaaatggcttaaagatattgtttggtatcaaatttttccagagcgttttgctaatggcgataaaagtaatgacccagcaaatgttaaagaatggaatccagaagatcatccaggcagagaagatttttatggtggagacttacagggagttttagatcatctagatgatctacagaaattaggagttacgggattatatttctgcccaatttttaaggcaagttctaatcataaatatgacacaattgattatttacaagtagatccagcttttggagacaaggatttgtttgcaaaagtagttaatgaagcacataagcgtgggatgaaagtgatgcttgatgctgtatttaatcacttaggtgatcaatcaatgcagtggcaagatgtcgttaaaaatggcgaaaaatcacgttttaaagattggttccacattaattcatatcctgttgaaccatatcgggacccaagtaaaggtgaaaataatccaccatatgaaacttttgccttcgaaaaacatatgcctaagttaaatacggctaacccagaagtacaggactttttattagaaattgcgacctactgggtaaaatattttgatattgatgcttggcggctagatgttgcaaatgaagttgaccaccatttctggaagagattccatgatgaattagttaaaataaagcctgatttttatattgctggggaaatatggcattcagctcgtccatggcttcagggggatcaatttacaggtgtaatgaattatccatatactttacaaattgaagaccacttctttaaacataaaatggatgctaaagaccttagtgaacacctaactgatcagttaatgatgtatccagatatggttgaccaggctatgatgaatatgcttgattcccacgatacggctagaattttaactttagcaaaagacaatcaagatttagctttgcaagcagttgcgtatgaatttgttcaacctggagtgccatgtatttactatggaacagagatggggatgagcggtgataatgatccggattgtcgtaaaccaatggattggagtaagataaatggtccggtatggcaaagagttcatgaattagtgaaattcagactagatcatagtgataccttaaataaaggtactgttaagttaacggtaacagaaaaaggacttctaaaagttgaacgaacaggcaaagaaacaataaaggcctactataataccggtaaacataatgtaaaaattgataaaacagcagctcttagtcagaattataaagcgggagtgttagcgccaaatggctttttgattgaggttaaagcttaa

SEQ ID NO: 162 - protein, 574 aa, Lactobacillus johnsonii NCC 533
MQLAALKHRTESENCFVIDHSHVKIRLHTAKDDVEKVIVHYTDNYLPPKQAKELEMEKIGSGQVNDYWGATLTAPYHRIKYTFEVIGKDGSHVIFGDRSIEKFSDKKLREDGMYFKVPYFHDIDRIKTPKWLKDIVWYQIFPERFANGDKSNDPANVKEWNPEDHPGREDFYGGDLQGVLDHLDDLQKLGVTGLYFCPIFKASSNHKYDTIDYLQVDPAFGDKDLFAKVVNEAHKRGMKVMLDAVFNHLGDQSMQWQDVVKNGEKSRFKDWFHINSYPVEPYRDPSKGENNPPYETFAFEKHMPKLNTANPEVQDFLLEIATYWVKYFDIDAWRLDVANEVDHHFWKRFHDELVKIKPDFYIAGEIWHSARPWLQGDQFTGVMNYPYTLQIEDHFFKHKMDAKDLSEHLTDQLMMYPDMVDQAMMNMLDSHDTARILTLAKDNQDLALQAVAYEFVQPGVPCIYYGTEMGMSGDNDPDCRKPMDWSKINGPVWQRVHELVKFRLDHSDTLNKGTVKLTVTEKGLLKVERTGKETIKAYYNTGKHNVKIDKTAALSQNYKAGVLAPNGFLIEVKA

SEQ ID NO: 163 - DNA, 1668 bp, Lactobacillus johnsonii NCC 533
  CDS (1)..(1668): transl_table=11
atgaatgattggaaaaagaaagctgtagtgtatgaggcatatgtacaaagttttaaagattcaaatggagatggaattggagatattcagggactaatagaaaagctagactatataaaaaatttaggtgccaatgttatctggttaactccaatttttaaatctcctttagtagacaatggttatgatattgcagattatcaggccattaatccaatttatgggacaatggatgattttaagaaattattgagtaaggctcatgaaaaagggttgagaattgtcctggatttggttgttaatcatacttctgaccaacataaatggtttaaagaatcccaaaaaaacaaagaaaataagtattctgattattatatttggcgtgatccaaaagaagatggaagtgcacctactaatttaggctcagcttttggtggttcagcttggacctatgttccagaaagaaatcaatattatttacacctttttgcaaaacaacagccagatttgaactgggataatccagaagtaagaaatgatatttataaaataatgatgttttggttagacatgggagttgatggctttagaatggattccattagctttatatccaaaccaagtaaatttgaagatgcgcctttagaagataataaagagtatggcgcttattactatggatcagctaacggtccacatattcatcaatatttacaagagatgaacagagaagtactaagtaaatatgatgtaattgctattggagaaacgccacatacaagtgctaaagaagcaagattatttgttgaacctgaacgacatgaattagatatggtatttcaatttgaacatatgcatgttgattatggaaaatatggaagatactctgatgtaacttttaagatgagtgatctgcgcaattctatgtcgagttggcaaaatagtctttcttggaattcaaattatcttggaaatcatgatcaacccagaattgtctctagatttggaaatgataataagtatcgaaaagaatcagcaaaaatgttggctatagtatctttattacaaaagggtactccatttatttttcaaggtgaagaaattggaatgaccaatttacatattaagaaaatagatgagttaaaggaccttgaagcacataatatatataattttttaagatcaaaaggtattagtgaagatgacgcattgaatatggtcaacaggaaaactagagataatgcccgtacaccaatgcaatgggatgaatcggaacaaggtggtttttcaagtgaaacgccatggatggaagttaatccaaattataaagaaattaatgtgaagaaagatttgaaagatccagactcgatatatcatttttatcaaaagattttgaaattaagaaataataatcaagtattgttagatggaaagtatgagctagtttcttctgatgattctgcagtttttgcctatactcgaagtacggggaaagaaaaattggcagttatttgttcttttgtcccatataaggttaaatataatttgcctactgattttgtaaatagaaatgaattgcttttatctagctatggtgacaataaagcaaaagcctcaaatgttatgtatttaaggccttatgaaggagttgtgattagacgtgagtag

SEQ ID NO: 164 - protein, 555 aa, Lactobacillus johnsonii NCC 533
MNDWKKKAVVYEAYVQSFKDSNGDGIGDIQGLIEKLDYIKNLGANVIWLTPIFKSPLVDNGYDIADYQAINPIYGTMDDFKKLLSKAHEKGLRIVLDLVVNHTSDQHKWFKESQKNKENKYSDYYIWRDPKEDGSAPTNLGSAFGGSAWTYVPERNQYYLHLFAKQQPDLNWDNPEVRNDIYKIMMFWLDMGVDGFRMDSISFISKPSKFEDAPLEDNKEYGAYYYGSANGPHIHQYLQEMNREVLSKYDVIAIGETPHTSAKEARLFVEPERHELDMVFQFEHMHVDYGKYGRYSDVTFKMSDLRNSMSSWQNSLSWNSNYLGNHDQPRIVSRFGNDNKYRKESAKMLAIVSLLQKGTPFIFQGEEIGMTNLHIKKIDELKDLEAHNIYNFLRSKGISEDDALNMVNRKTRDNARTPMQWDESEQGGFSSETPWMEVNPNYKEINVKKDLKDPDSIYHFYQKILKLRNNNQVLLDGKYELVSSDDSAVFAYTRSTGKEKLAVICSFVPYKVKYNLPTDFVNRNELLLSSYGDNKAKASNVMYLRPYEGVVIRRE

SEQ ID NO: 165 - DNA, 1665 bp, Bacillus cereus ATCC 10987
  CDS (1)..(1665): transl_table=11
atgaataaaacatggtggaaagaagcggttgcttatcaaatttacccacgtagctttatggattcaaatggtgatggtattggggatttacaaggtattattgcaaaactggattatttaaaagatttaggtatagatgtaatttggatttgtccaatgtataagtcacctaatgatgataatggttatgacattagtgattatcaagatattatggatgagtttggtacgatggaggacttcgatgctttactagatgaagttcataagcgtgatatgaagcttattattgatttagttattaatcatacaagtgatgaacatccatggtttattgagtctcgttcatctaaagacaatccgaagcgtgattggtatatttggcatgatggtaaagatggtgcggaaccaaacaactgggaaagtatttttaatggttcggcatgggaatacgatgaagtaacaggacaatattatttacacttattctcacgtaaacaaccagatttaaactgggagaataaagaagttcgcgaagtgttatacgatacagttaattggtggcttgataaaggaattgatggtttccgtgtggatgcgatcagccatattaaaaaagaggatggctttaaagatatgccaaatccaaaagaactaaagtatgtaccatcttttgataaacatatgaatgtggatggtattcaacctttattagaagagttaaaagaaaatacattttctaagtacgatattatgactgtcggtgaagcgaatggtgttaagattgaagatgctgagctttgggttggagaagaacaaggtaagttcaatatggtattccaattcgaacatttaagcttatgggatgcagaaaagaagaaagatcttgatgttgtagggttgaaaaaagtattaacgaaatggcaaaaaggtctagaaaataaagggtggaatgctttatatattgagaatcacgataagccacgtatcgtttcaacttggggagatgataaacaatattggcgtgaaagtgcgacagctcttggagcgatgtatttctttatgcatggtacaccgtttatttatcaaggacaagaaattgggatgacaaatgttcaattcccaaatattgaagattacgatgatgtagcaattaaaaatttatatcgtgagaaaattgcagagggtgtatctcatcaagatatgatggagattatatgggcttcttgccgcgataattcacgtacacctatgcagtggaacgatgagatgaatgctggcttcacaacaggtgccccttggtttgggatgaatccaaactataaagaaattaatgttgaaaagcaaaagagtgaagagaactctattttcaatttctataagaaaatgattgctttgaaaaaagagcacgatgtactgaattatggtacgtacgatttacttttagaagatgatccgcaaatttatgcatatactcgtacattaagcgatgaaaaaatcgttgtaattagtaatatctcaaaagaggaagctgtatataatgagggttcattcgcgatagaacgcaaacgtttgcttttaaataactacgaagttgcggaacatgaacaagtaactacaatcacgttaaagccttatgaaacaagggtttatcgtatttcataa

SEQ ID NO: 166 - protein, 554 aa, Bacillus cereus ATCC 10987
MNKTWWKEAVAYQIYPRSFMDSNGDGIGDLQGIIAKLDYLKDLGIDVIWICPMYKSPNDDNGYDISDYQDIMDEFGTMEDFDALLDEVHKRDMKLIIDLVINHTSDEHPWFIESRSSKDNPKRDWYIWHDGKDGAEPNNWESIFNGSAWEYDEVTGQYYLHLFSRKQPDLNWENKEVREVLYDTVNWWLDKGIDGFRVDAISHIKKEDGFKDMPNPKELKYVPSFDKHMNVDGIQPLLEELKENTFSKYDIMTVGEANGVKIEDAELWVGEEQGKFNMVFQFEHLSLWDAEKKKDLDVVGLKKVLTKWQKGLENKGWNALYIENHDKPRIVSTWGDDKQYWRESATALGAMYFFMHGTPFIYQGQEIGMTNVQFPNIEDYDDVAIKNLYREKIAEGVSHQDMMEIIWASCRDNSRTPMQWNDEMNAGFTTGAPWFGMNPNYKEINVEKQKSEENSIFNFYKKMIALKKEHDVLNYGTYDLLLEDDPQIYAYTRTLSDEKIVVISNISKEEAVYNEGSFAIERKRLLLNNYEVAEHEQVTTITLKPYETRVYRIS

SEQ ID NO: 167 - DNA, 1710 bp, Anopheles gambiae str. PEST
  CDS (1)..(1710)
atggactggtggcaaaggacggtgttctatcagatctacccgcgctcgttcatggactcgaacggggacggggtgggcgatctgcgcggcataacgagccggttggagcatctgaaggatgccggcattggtgcgacctggctatcgcccatcttccgatcgccgatggttgacttcgggtacgacattgcggactataccgccatccagccggagtacgggacgatggaggactttgaggcgctgctggcggaagcgaagcggctcggcatcaagatcatcctggactttgtgcccaatcacacgagcgaccagtgcgaatggttccggcggtcggtggcgcgcgaacacccgtacaccgattactacgtgtggcaggatgggcgcgtcgacccaaacggtaatgggacggcccgtttgccaccgaacaattggcaatcggtattctacggttccgcctggacgctgcatccggaccgcggtcagtactatttgcatcagtttaccgcccagcagccggatctgaactttcgcaacccggccgtggtggacgagatgcgcgaggtgctgcggttctggctgcgcaagggtgtggccggctttcgcatcgacgccgttaatcatctgttcgaggcggacggctttccggacgagccggaaacgggcacggaccgggatccactgtcctacggctttacgcaccacatctacacgaaggatttgctcgaagactacgacatggtgtaccagtggcgagcgctgctggacgactggagccgcgagcatggaggcgacgctcgcatcataatgaccgaagcgtacgccaacattaccttcaccatgaagtactaccacgcggaggaggacgacggcgaccagccggacggtcaaccgcgagccgctgcgggttcacacatgcccttcaactttctgctcatcaccgacctgaaccgtgactcgagtgcgcaggactttgtgtacacgatacagaagtggctcacgtacatgccgcgggtgggggccaccgccaactgggtgctgggcaatcacgatcagccgcgctggctgaacgcgatgccggccggcgcccgggcgaactgggtgctgggcaatcacgatcgtccgcgcattgcctcgcggtacgggcgcgatcttgcctcgagcctggccgtgctggagatgacactgcccggcattgcggtcgtgtactatggtgaggagatcggtatggaggacaaccgggacattacgttcgaggagacgcaggacccgcaggccgccaacacgaacccggacgtgtatcagcagtttacgcgcgatcccgtccgcacaccgttccagtgggatgcgacggcgtacgctgggtttaccgtagctagcgcccagaagacgtggctgccggtacatccgaactatcgggaggtgaatctggccgcccagaaggcggcgagcaacagtatgttcaagctgtaccagcggctgatcaagctgcgcaaggagcacacgttcatgcacggtgatttcgagtcgaaggtgctgctgaacaatgtgtttggctatacgcgcacgctcgagggcgagcagtcgtacgcggtcgtggtcaatctgaacgataacgatgtgaatgtgaacctgcaggagctgcacgaggacattgacacggcccgggtggcgcttacgtcgctcgacgctcgcatgaaggagggctag

SEQ ID NO: 168 - protein, 569 aa, Anopheles gambiae str. PEST
MDWWQRTVFYQIYPRSFMDSNGDGVGDLRGITSRLEHLKDAGIGATWLSPIFRSPMVDFGYDIADYTAIQPEYGTMEDFEALLAEAKRLGIKIILDFVPNHTSDQCEWFRRSVAREHPYTDYYVWQDGRVDPNGNGTARLPPNNWQSVFYGSAWTLHPDRGQYYLHQFTAQQPDLNFRNPAVVDEMREVLRFWLRKGVAGFRIDAVNHLFEADGFPDEPETGTDRDPLSYGFTHHIYTKDLLEDYDMVYQWRALLDDWSREHGGDARIIMTEAYANITFTMKYYHAEEDDGDQPDGQPRAAAGSHMPFNFLLITDLNRDSSAQDFVYTIQKWLTYMPRVGATANWVLGNHDQPRWLNAMPAGARANWVLGNHDRPRIASRYGRDLASSLAVLEMTLPGIAVVYYGEEIGMEDNRDITFEETQDPQAANTNPDVYQQFTRDPVRTPFQWDATAYAGFTVASAQKTWLPVHPNYREVNLAAQKAASNSMFKLYQRLIKLRKEHTFMHGDFESKVLLNNVFGYTRTLEGEQSYAVVVNLNDNDVNVNLQELHEDIDTARVALTSLDARMKEG

SEQ ID NO: 169 - DNA, 1800 bp, Anopheles gambiae str. PEST
  CDS (1)..(1800)
atggccctctactactggctagctttactactgttgggctggtctactgtgaccgcccagaaggattggtgggaaagtgcgagcttctatcaaatctatccgcgatcgtttcaagatagtaacggcgatggaataggcgatcttaatggcatcaaaagtcggttgccgtatctgaagtcactcggtatgactgcattttggctttccccgatctacccttcgccgatggccgactttgggtatgatatctccaactttatggacattcatccgagctttggaacgttggctgactttaagcagctggtggaagaagcgaaaaaactgcaattacgcatcatcctcgacttcgtgcctaaccattcgagcgacgagcatgagtggttcaagaaaagcgttcagcgagtaagtgggtacgaagactattacgtgtggcaggatcccaaaccgggcacggaacgcgaccctccaaacaactgggttgcagcatggtacggttcggcgtgggaatggaatgacgaaagaaagcaattttatttgcaccagtttcacaagaagcagcccgatctgaactaccgcaacccggccgtggtgcaggctatgaaggatgtgttgcgcttctggttggaccagggcgtcgacggcttccgtattgatgcggtcccgtggctgttcgagacggtgggtttcccggacgaacctgttagcggtcattccaccgatccgttaagtcagaactaccttacccacatttatacgctcgatcaaccggaaaccgttgacatggtgtatcaatggcgggaattgatggatcagtacaaacaagagcacaataccaccaccaaagtgctcatgaccgaggcatggtcctcgttggatgttgtaaaaacgtacttcaacgacagtaacaaccggcaaggatcgcaaatgccgttcaacttccagttaatcatgcggctggatcaaaattctaaagcatccgattttcagacggttattaactcgtggctggatatcattcctcctggccacacgcccaactgggtgcttggtaatcacgacaaacgtcgtgtttcgtcacgaatgggtggagaccatatggtagacataatggctatgatcgagctcaccttacccggcataacggtcacttaccagggagaagaaattggaatgcatgacgttgatatctcgtgggcggacactcaagatcctgctgcatgccagctgaccgaagagacgtatcaggaaggtacacgcgacccagccagaacaccgttccagtgggattctactgcaaacgcaggttttacgaacgcttctgtaaaaccgtggcttccgctagctaccgattatccgctggtgaacgtaaaaacacaacaagaatcagcccaaaacagtcatataaaggtgttcaaggagctgatgaacttacgcggcacgaacacgcttatctggggctcgtttaagtcactggtacttggcgaaaatgtgtacgctatactgcgttctttccccaacgacaaacgaacatatgtcgtgctggcaaacattggctccaagagcgaaataattgacgctacaaaactggacaacagtttaccgaacgagcttgtgtttcgcgtggtaagcgtatcgtcaaatcatatcaccggagaatcggtcgcaacaaacaacattcttttacagccttacgaagccgtagttttggctaaccatgcaattcgactggcgcagcagctttatgtattgatcggtgcttttggtatgttggtgggtgtgcaattgtttaaggcgtaa

SEQ ID NO: 170 - protein, 599 aa, Anopheles gambiae str. PEST
MALYYWLALLLLGWSTVTAQKDWWESASFYQIYPRSFQDSNGDGIGDLNGIKSRLPYLKSLGMTAFWLSPIYPSPMADFGYDISNFMDIHPSFGTLADFKQLVEEAKKLQLRIILDFVPNHSSDEHEWFKKSVQRVSGYEDYYVWQDPKPGTERDPPNNWVAAWYGSAWEWNDERKQFYLHQFHKKQPDLNYRNPAVVQAMKDVLRFWLDQGVDGFRIDAVPWLFETVGFPDEPVSGHSTDPLSQNYLTHIYTLDQPETVDMVYQWRELMDQYKQEHNTTTKVLMTEAWSSLDVVKTYFNDSNNRQGSQMPFNFQLIMRLDQNSKASDFQTVINSWLDIIPPGHTPNWVLGNHDKRRVSSRMGGDHMVDIMAMIELTLPGITVTYQGEEIGMHDVDISWADTQDPAACQLTEETYQEGTRDPARTPFQWDSTANAGFTNASVKPWLPLATDYPLVNVKTQQESAQNSHIKVFKELMNLRGTNTLIWGSFKSLVLGENVYAILRSFPNDKRTYVVLANIGSKSEIIDATKLDNSLPNELVFRVVSVSSNHITGESVATNNILLQPYEAVVLANHAIRLAQQLYVLIGAFGMLVGVQLFKA

SEQ ID NO: 171 - DNA, 1509 bp, Anopheles gambiae str. PEST
  CDS (1)..(1509)
atgcttgctggggcactctctttagtggcatgtttagatcttaccgtaccaacgtcccgcgattggtgggaaaaggctgccttctatcaaatctatccccgatcgttcatggacagtgatggggatggtgtgggcgatcttaacggaattgcttcgaagctgccgtacctgaagtcgatcggagtgaaggcgttctggatgtcaccgatctacaaatcaccgatggtcgattttggctatgatatttctgactttcgggacattcacgaggagtttggaacgatggctgactttgagcggttggtggagcaggcgcacgggctcggcctgaaggtgatcatggactttgtgccgaaccattcgagcaatctgcacgagtggttcgtaaagtcggaacagcgagagccgggctatgaggactattacgtgtggcatgatgggaaggttaatccggcgggcggtaggaacttaccaccaaacaattggattcaagccttccgtggcagtgcatggcagtggagtgatcagcggcaacagtactacctacaccagttcaccgtcgagcaaccggacttaaactaccgaaatccgacggtcgttcaggagatgaaagatgtgctgctgttctggctgggcaagggcgtggacgggttcaggatcgatgccgtgccgacgctgtacgaagatacgcagctgcgcgacgagccagtgagcgggctgacggatgatcccgaagataccaactacctgcgacacatctacacgcaggatctgccagaaacggtcgagatggtgtacgaatggcgggaactgatcgatgcattccaggcagagcatggcggcgagacgcgcgtcatcatgacggaggcctactcaacgctagatgtgatcaagacgtattacgcgagcagtacaggacggttgggatcccatatgccgttcaactttcgactcattaccgaagtggacaagcaatcgacggctgcggactacgtgaaggtggtcaaggattggatgagcatactgcctgccggacaggtgccaaactgggtgatgggcaatcatgatcgtccacgcgttgccacgcgtctcggggaggaacgaattgacgcactgaacatggtgctgctgtccctctccggcgcaagtgtcacataccaaggggaagagattggcatgaccgatgtgtacatctcctgggaggacaccgtcgatccggcggcctgcaatgcaggcaaagacctatacgcggaaaagtcacgcgatccgtgccgcacaccgttccagtgggatgatacggcaatggctgggtttactaccggctccaaaacctggctacccgtcggcgaccggtacagggaagtgaacgtgcaggcgcaacttgcggccgaaaaaagtcacctcaaagtgtaccaatcgatgatggaattgcgcaagacgaaaacttaccagctcggtacggtgaaagcagttgcgctcggcgattccgtgctggcggttgtgcgatag

SEQ ID NO: 172 - protein, 502 aa, Anopheles gambiae str. PEST
MLAGALSLVACLDLTVPTSRDWWEKAAFYQIYPRSFMDSDGDGVGDLNGIASKLPYLKSIGVKAFWMSPIYKSPMVDFGYDISDFRDIHEEFGTMADFERLVEQAHGLGLKVIMDFVPNHSSNLHEWFVKSEQREPGYEDYYVWHDGKVNPAGGRNLPPNNWIQAFRGSAWQWSDQRQQYYLHQFTVEQPDLNYRNPTVVQEMKDVLLFWLGKGVDGFRIDAVPTLYEDTQLRDEPVSGLTDDPEDTNYLRHIYTQDLPETVEMVYEWRELIDAFQAEHGGETRVIMTEAYSTLDVIKTYYASSTGRLGSHMPFNFRLITEVDKQSTAADYVKVVKDWMSILPAGQVPNWVMGNHDRPRVATRLGEERIDALNMVLLSLSGASVTYQGEEIGMTDVYISWEDTVDPAACNAGKDLYAEKSRDPCRTPFQWDDTAMAGFTTGSKTWLPVGDRYREVNVQAQLAAEKSHLKVYQSMMELRKTKTYQLGTVKAVALGDSVLAVVR

SEQ ID NO: 173 - DNA, 1716 bp, Gibberella zeae PH-1
  CDS (1)..(1716)
atgggtagtacaggtcaaactctacgagcttggtggaaagagagctcggtatatcaaatataccctgcgtcttaccaagactccacaggctctggtgttggtgacctcaaaggtatcatctctcgagttgactacctcaaagacttgggcgttgatatcatatggctttctcccatcttcaagagtccccaggttgatatggggtacgatatcagcgactactacaccgttgatcctccgtatggcaacgtctctgatgttgatgttctcaaagacaaactacatgagcgaggaatgaaacttgttctcgatttggtgatgaaccacaccagcgaccaacacgagtggttcaaggagtctcgcaagtccaaggacaacccctaccgagactggtatatctggaagcctgcaaagtacgatgcagacggaaacagacacccccccaacaactgggatgctcacttccagggaagtgcctgggagtacgacgagatcacagatgagtactacctctgcctcttctgcaagcagcagccagatctcaactgggagaacccagcggtcagaaaacaggtccaccaggtaatgcgcttctggcttgaccgaggcgtcgatggtttccgcatggacgtcatcaactttgtcagcaaggaccaagcattccccgactcagacaagactgtcctccgtgggacagagtactatgcatgtggtcctaggtgtcatgagttcctcaaggaaatcggtagcattctccaggagtacgatgcctttagtgttggtgaaatgccttgtgttcatgatgagagggagttgatcaaggctgtgcacggtgaccgaggagagctgagcatgatcttccattttgagctgatggatcttgatcacggcgtcgaaggcaagttcacgcccagatcctggaaactatcagagctgaaggctacaaccctcaagtggcagaggttcatgtacgacaacgaaggctggaacgcgctgtacctggagaaccacgatcagccacgagctgtcagccgcttcgtccacgatgatcctgagcatcgcgttgccagcgcgaaactgatcgcactcttcctcggcttccagtcaggcacacccttcatctaccaaggccaggagattggtatgaccaatgttccgaaggactgggacttggaagagtacaaggaccttgactgtcttaaacattgggatcttcacaagaatgatgatgttgcagcccagaattcctacaaggtcgagtatcaaaggaagtctcgtgacaacgctcgtacccctatgcaatgggatgcaagcccaaacgcaggcttcaccactgctgatgccaacccgtggatgcgcgtcaacgacaactataccgacatcaacgctgcttcacagacatcagattccaactctgtgtacagctgttatcgtcaagtacttgggaagcgcaaggagtacaaggatatctttgtctatggtaacttccaactcgtggacgagtccaacgacaagatctttgcgtactcacgacgggctgatagcggggagacggctctcgtcgtgtgcaacttctcagtggattccgttgcatggaagttacctggcgaggctcgagaggtgctgactagtccagcgggaaggacactcaatgacttgaacagtggtgagatcaagctagcaccctgtgaggctttcgctgtcctcctgaaatga

SEQ ID NO: 174 - protein, 571 aa, Gibberella zeae PH-1
MGSTGQTLRAWWKESSVYQIYPASYQDSTGSGVGDLKGIISRVDYLKDLGVDIIWLSPIFKSPQVDMGYDISDYYTVDPPYGNVSDVDVLKDKLHERGMKLVLDLVMNHTSDQHEWFKESRKSKDNPYRDWYIWKPAKYDADGNRHPPNNWDAHFQGSAWEYDEITDEYYLCLFCKQQPDLNWENPAVRKQVHQVMRFWLDRGVDGFRMDVINFVSKDQAFPDSDKTVLRGTEYYACGPRCHEFLKEIGSILQEYDAFSVGEMPCVHDERELIKAVHGDRGELSMIFHFELMDLDHGVEGKFTPRSWKLSELKATTLKWQRFMYDNEGWNALYLENHDQPRAVSRFVHDDPEHRVASAKLIALFLGFQSGTPFIYQGQEIGMTNVPKDWDLEEYKDLDCLKHWDLHKNDDVAAQNSYKVEYQRKSRDNARTPMQWDASPNAGFTTADANPWMRVNDNYTDINAASQTSDSNSVYSCYRQVLGKRKEYKDIFVYGNFQLVDESNDKIFAYSRRADSGETALVVCNFSVDSVAWKLPGEAREVLTSPAGRTLNDLNSGEIKLAPCEAFAVLLK

SEQ ID NO: 175 - DNA, 1635 bp, Leptospira interrogans serovar Copenhageni str. Fiocruz L1-130
  CDS (1)..(1635): transl_table=11
ttggataagtggtggcaaaaaacaacgatttaccagatttatccccgctcttttgcagatagtaatcgggatggtgttggagacattccagggatcatttctaaattggattatcttcaagatcttgggtttgaaacaatttggatatctcctttgtataaaagtccacaaatggatcacggttacgatgtaagtgattattactcgatcgctccagaatatggaactataaaagatgcagaaaagttaataaaggaagttcataagcgcgggatgaaaatcgtttttgatatggtgatgaatcatacttctattgaacacgattggtttatacaatcccgttctagtcgagataatcctaaaagagattggtatatttggaaagacggaagaggaaaaaataaacctcctaataattggagttcgtttgtgacacccaaggcctggcattatgattccaatacggatcaatggtatcttgcgagttttctagattttcaaccagacttaaattattacaatccagaagtcaaaaaggcaatgttcgacgttttgcgtttttggcttaagaagggagtagatggtttccgtttggatatttttcacgcgatttataaggataaatatttcagagacaatccgtttcgatttaaatatatcgtttcggaaaatgatcacgatggttattttcagagtagggttcatactgtaaaccatccaaataactttgcttttgcgaaagagctaagatccgttttagatgagtttgatggagatcgttttgcggtaggagaggtggccggagatgatcatatcatcaaacgctacttaggcgaaaaaaaagatggcctgaatctaatctttttattcgaaactttgttgttaaagttcaagactagtttttttaagggaatcgtaaaaaaaatggaacaagtatatccgtatccaaacgttcccacatacgtttttggaaaccatgaccaaagacgttacatgatgaaaatcaataataatctcgaaaaaggaaaattgattgctctgtttcagtttaccgcgaggggggttccagtcacttattacggagaagaaattggaatgaccaatgagacgatcaaattaactgaggcacaggatccgcttgcaagaatctatcgctggttaggtgattcgctttccgaattgttgggactcgcagacgttatcattcgggatcgagcaaggtcgccgatgcaatgggacgactcgccaaacgcaggttttacggttcaagaagcaaaaccatggattcgggttcacggaaattatagagaacgtaacgttttgatcgagtccgaagattcggattctcttttaaatacttataaaagtgttcttcgcattcgaaatggaagttttgctcttaaagagggttctttgagattaattgaagaaaacgttccaaaagatatgttagtttatttaagggaatttggtaaggaacgtaaactgatcgtttttaattttggtaaaaaaaccaaatttttttctaatcctaccgattgtagaaaatattttttctctacggtttctttcgatcataacgaatttgatcaatttaaaatacctccttgttctggagttatattaggtaattag

SEQ ID NO: 176 - protein, 544 aa, Leptospira interrogans serovar Copenhageni str. Fiocruz L1-130
MDKWWQKTTIYQIYPRSFADSNRDGVGDIPGIISKLDYLQDLGFETIWISPLYKSPQMDHGYDVSDYYSIAPEYGTIKDAEKLIKEVHKRGMKIVFDMVMNHTSIEHDWFIQSRSSRDNPKRDWYIWKDGRGKNKPPNNWSSFVTPKAWHYDSNTDQWYLASFLDFQPDLNYYNPEVKKAMFDVLRFWLKKGVDGFRLDIFHAIYKDKYFRDNPFRFKYIVSENDHDGYFQSRVHTVNHPNNFAFAKELRSVLDEFDGDRFAVGEVAGDDHIIKRYLGEKKDGLNLIFLFETLLLKFKTSFFKGIVKKMEQVYPYPNVPTYVFGNHDQRRYMMKINNNLEKGKLIALFQFTARGVPVTYYGEEIGMTNETIKLTEAQDPLARIYRWLGDSLSELLGLADVIIRDRARSPMQWDDSPNAGFTVQEAKPWIRVHGNYRERNVLIESEDSDSLLNTYKSVLRIRNGSFALKEGSLRLIEENVPKDMLVYLREFGKERKLIVFNFGKKTKFFSNPTDCRKYFFSTVSFDHNEFDQFKIPPCSGVILGN

SEQ ID NO: 177 - DNA, 1251 bp, Thermus thermophilus HB27
  CDS (1)..(1251): transl_table=11
ctggacctgggggtggaggccatctacctcaaccccgtcttcgcctccaccgccaaccaccgctaccacaccgtggactacttccaggtagaccccatcctggggggaaacgaggccttaaggtacctcctggaggtggcccacgcccacggggtgagggtcatcctggacggggtcttcaaccacacgggccggggcttcttcgccttccagcacctcatggaaaacggcgagcaaagcccctaccgggactggtaccacgtcaagggcttccccctaaaggcctacaccgcccaccccaactacgaggcctggtggggcaaccccgagctccccaagctcaaggtggagaccccggcggtgcgggaatacctcctcgccgtggccgagcactggatccgcttcggcgtagacggctggcgtctggacgtgcccaacgaaatccccgaccccaccttctggcgggagttccgccaaagggtcaagggggcaaaccccgaggcctacatcgtgggggagatctgggaggaggcggacccttggctccagggggacatgtttgacgcggtgatgaactaccccctcgcccgggccgtcctgggcttcgtgggcggggaggccctggaccgggacctcgcggcgcagacgggcctaggccgcatagaacccctccaggctctggccttcagccatcggctggaggacctcttcggccgctaccgccccgaggtggtccgggcccagatgaacctcctcacctcccacgacacccccaggctcctcagcctgatgcgggggagcgtggagcgggcccggctggccctggccctcctcttcctcctcccggggaaccccaccgtctactacggggaggaagtggggatggcggggggcaaggacccggaaaaccggggcgggatggtctgggaggaggcccgctggcagaaggacctcctggagacggtcaagcgcctggcccggctcaggaaggaacaccccgcgctccgcaccgccccctacctgcggatctacgcccaggacggccacctggccttcgcccgggggccccacctggcggtggtgaacgcctctccccaccccttccgccaggacttccccctgcacggggtcttcccccgggggggaagggcggtggacctcctctccggggaggtctgcacgccccagggggggaggctctgcggccccgtgctcccgcccttctccctggccctgtggcgggaggcctaa

SEQ ID NO: 178 - protein, 416 aa, Thermus thermophilus HB27 [sequence omitted]

SEQ ID NO: 179 - DNA, 1662 bp, Listeria monocytogenes str. 4b F2365
  CDS (1)..(1662): transl_table=11
atgaaagaaaaagattggtggaaaaaaagcgtagtgtaccaaatctatccaaagagttttaatgattcaaatggtgatggagttggtgatattcaaggaattatcgagaaattagattatttaaaagagctaggtgtggacgttatctggttgtccccagtatacgattcgcctcaagatgacaatggttacgatattcgcgattatcaaaaaatttacgaagagtatggagatatggcgacttttgatcaattacttcaaggtttacacgaccgcgaaatgaaacttgtaatggatcttgttgttaaccatacttctgatgaacacaagtggtttgaggaatccagaaaatccaaagacaacccgtacagagattactatttctggcgcgaggaaaacgaaatcaataactggggctcgattttcagcggtccagcatgggaattggacgaaaaaacaggtgagtactatttacacctattctccaaaaaacaacctgatttaaactgggaaaaccctaaattacgccaagatgtatataatatgatgaaattctggctagataaaggcattgatggcttccgcatggatgtaattaattttatttccaaaaatactgatttcccagatggtccagtaccagatggtcaaatttatggcgatgctggcaatgatttttgtaatggaccgcggattcatgagttcttgcaagaaatgaaccaagaagttacttctaaatacgatgtgatgactgttggcgaaatgcctggtgctagtacaaccgacgcgcaaatttacacgaatccagcaaataatgaagtcgatatgatttttacatttgaacatatgaacttagattccgatggcgacaataaatgggatctaaaaccaatctacttaccagatttaaaagaaaatatgtctgaatggcaagtggcgcttcaagaaaacggttggaatagcttatattggaataatcatgaccaaccgcgtatcgtttctcgttttgggaatgacaatcgtttccgtgttcgttcagcgaaaatgcttgcaacttgtttgcatatgatgaaaggaacgccatatatttatcaaggtgaagaaattgggatgacgaatgttcattttgaaacgctagatgattaccgtgatatcgaaacgctaaacatgtacaaagaacgcaaagagcaagggcacagccacgaaagcatcatgcagtcgatttacacaaaaggccgtgacaatgcgagaacgccgtaccagtgggataatagcgagaatgctggcttcacaaccggaacgccttggcttaaagtcaacccgcgctatacagaaatcaacaacgaagaagcgctgaaaaacccagattccattttctactactaccaaaatcttattaagttacgaaaaacgactgaaatcatcacaactggtaattatcgtttgttattacctaaagatgaagcgattttcgcatatgaacgctacacagaaaatgaaaaattagtggttttatgtaatttcacagaagaagaacaagttatttctgatgaaaacattttgaacgaaatccaaaaaggttccgtgcttgtaaacaatgttcctaatattatagaaggaactttacgaccttacgaagcaatcgtttatcaaatcaagtaa

SEQ ID NO: 180 - protein, 553 aa, Listeria monocytogenes str. 4b F2365
MKEKDWWKKSVVYQIYPKSFNDSNGDGVGDIQGIIEKLDYLKELGVDVIWLSPVYDSPQDDNGYDIRDYQKIYEEYGDMATFDQLLQGLHDREMKLVMDLVVNHTSDEHKWFEESRKSKDNPYRDYYFWREENEINNWGSIFSGPAWELDEKTGEYYLHLFSKKQPDLNWENPKLRQDVYNMMKFWLDKGIDGFRMDVINFISKNTDFPDGPVPDGQIYGDAGNDFCNGPRIHEFLQEMNQEVTSKYDVMTVGEMPGASTTDAQIYTNPANNEVDMIFTFEHMNLDSDGDNKWDLKPIYLPDLKENMSEWQVALQENGWNSLYWNNHDQPRIVSRFGNDNRFRVRSAKMLATCLHMMKGTPYIYQGEEIGMTNVHFETLDDYRDIETLNMYKERKEQGHSHESIMQSIYTKGRDNARTPYQWDNSENAGFTTGTPWLKVNPRYTEINNEEALKNPDSIFYYYQNLIKLRKTTEIITTGNYRLLLPKDEAIFAYERYTENEKLVVLCNFTEEEQVISDENILNEIQKGSVLVNNVPNIIEGTLRPYEAIVYQIK

SEQ ID NO: 181 - DNA, 1533 bp, Listeria monocytogenes str. 4b F2365
  CDS (1)..(1533): transl_table=11
ttggaattttggcgtcgtagtgtgttttatgaaatttatatgaaatcatttcaagacagtaatggcgatggtttaggtgattttaaaggtttaacgagcagattagattatctagtggatttgggaattgatggtatttggttgactccattttatccttcaccgcaagtggataatggttatgatgtgtctgattactgcgatattaacccggattacggcgatatgactgattttcgagtgtttatgaaagcggcagatgctcgaggaataaaagttattatcgacttagtattaaatcattcgtcaacagagcatgcttggtttaaggagtcgcgtagtagtaagacgaatcctaaacgagattattatatttggcgagaaaaaccaaataattgggaatcgttttttggtggttctgcttgggaaatggatgaacttactggcgagtattactatcatagttttgcaaaagaacaggctgacttaaactgggcgaatgaagctgttcgcgcagaaatggagcaagttttagcgttttggttgaatgagggagtggcgggattcaggttagatgttatcaataatttaacgctcgtacttgaatttacggataatccagtcacatctggtgaaatggagcatgtgtatgaccgtaatcagagtggcttagaacaagcgttagaggatatcgcttccttttgtcgaaaagagcgcgacgtgtttctagtaggcgaaattagctcggaccaattagctgaaattgctagatatagctcgaaaaaaatgctagatgtcacatttaattttaattttggcagtgttgatcagctagatgcaaaatctgtatttacgacattgaatgagatggaaacggcattaaatgaagggcagtggccgacgcttttctttggaagtcatgatatgagcaggttcagaagtcgcctcgcatctggaggcttagtaaagacccagttgctcgcatttttaatgttaactgcgaaaggcgtgccgtttatatactacggagaagaggtgggtatgcctgatttaacgttttcttccgtaaaagagatgcgcgatattcaagggacagccgcgtactatcaagctttacaaactgggacagatgaaaaacaagcactcgaaattgctattgaaaaaacgcgtgacaaagcacgtgggccgatgattttcccagatggaaagccatttactctaggtgaaccatggattaaaatggcgactttgccggaaaaagaagcacgaacgatgtggcgattttatcaaggattactcgcatttcgtaaagaaaatgattttaaagagatggaatatacttttttgaagttggatggagaagtactcagttatcagcgaggtgaatttatctttttacttcattttggtgaggaagaggtaacttatccgcttcaggggaactatcagcttgtttttggagaagcagtgatggtaggaaatggcattagaatgggcgcgcatactggaattgcgcttagagtggaggaatag

SEQ ID NO: 182 - protein, 510 aa, Listeria monocytogenes str. 4b F2365
MEFWRRSVFYEIYMKSFQDSNGDGLGDFKGLTSRLDYLVDLGIDGIWLTPFYPSPQVDNGYDVSDYCDINPDYGDMTDFRVFMKAADARGIKVIIDLVLNHSSTEHAWFKESRSSKTNPKRDYYIWREKPNNWESFFGGSAWEMDELTGEYYYHSFAKEQADLNWANEAVRAEMEQVLAFWLNEGVAGFRLDVINNLTLVLEFTDNPVTSGEMEHVYDRNQSGLEQALEDIASFCRKERDVFLVGEISSDQLAEIARYSSKKMLDVTFNFNFGSVDQLDAKSVFTTLNEMETALNEGQWPTLFFGSHDMSRFRSRLASGGLVKTQLLAFLMLTAKGVPFIYYGEEVGMPDLTFSSVKEMRDIQGTAAYYQALQTGTDEKQALEIAIEKTRDKARGPMIFPDGKPFTLGEPWIKMATLPEKEARTMWRFYQGLLAFRKENDFKEMEYTFLKLDGEVLSYQRGEFIFLLHFGEEEVTYPLQGNYQLVFGEAVMVGNGIRMGAHTGIALRVEE

SEQ ID NO: 183 - DNA, 1761 bp, Bacillus thuringiensis serovar konkukian str. 97-27
  CDS (1)..(1761): transl_table=11
atgcttaaagaagccatttatcataggccaaaagataattacgcatacgcttatgatgaaaaaacgattcacatccgaatacgtacgaaaagagacgatgttcaaagcaccactcttatttatggtgatccttatgaatggaaagacgggaagtggatttcttcaagtacaccgatgaaaaaaactggttctactgcattgtttgattattggttcatttccatcgagccgaaatttaagcgcttacgttatggatttgaattaaaaaacgatacagacactcttatttatgcagagcgaggatttttttctaccactccaaatgatgacgttggtaactttttctgttttccatttattcatgcaaatgatgtattcaaagcaccttcttggattaaagatactgtttggtatcaaattttcccagaacggttcgctaatggagatcatacgctgaatccagaaaacacccttccttggggcagcgctgagccaactccaactaattttttcggtggagattttgctggtattattcaaaaccttgattaccttgttaagctcggaatttctggaatatatttcacacctattttcaaagcacattcaaaccataaatatgacacaattaactacatggaaatcgatccgcaatttggcacaaaagaaacattcaaagaactcgttcaggcatgtcatacacatggtataaaggtaatgctcgatgccgtattcaatcacagtggatactttttcgataaatttcaagacgtactacaaaatggtgagcagtcagcatataaagaatggttccatattcatgagttcccaattagaactgagccactcccgaattatgatactttcgcgtttacaccatatatgccaaagttaaacacagcgcacccggatgtaaaagaatacttacttgaagtagggcgttattgggtgagagaattcaatatagacggttggcgccttgatgtagcaaatgaagtcgaccataacttttggagagaatttcgaagtgagataaaagcattaaattctgaagtatatattttaggagaaatttggcacgatgcacttccatggctacaaggagatcaattcgatgctgtcatgagctatcctgttacaaacgccctactgtcttactttgctaacgattccattaaggcaaatgaatttatgaaacaaattacagaatctctacattcctactctatgaatgtaaatgaagcagcatttcatttattagatagccatgatacaccaagaattttgacaacatgtaacggagataaaaataagttaaaattactttatgtattccatctttctttcatcggctctccttgtatttattatggagacgaaattggtatggacggcggtatggatccagattgtcgcaaatgtatggtttgggatacggaagaacaagatcatacattatttacacatgtacaaacattaatttcattacgaaagcaatataaagcatttggaggacatggtactttccaattcattgaagcaaatgatgaatataattatatttcttatacgaaaacatatgaagatgaaacgatctttttcgttttaaatccgactaatagtgatattacagcttcactccctctccatgttactggaaagaaaatcattaatatttatacaaacgaagaattttcagcggaagcaagtgtattacaagttacacttcctccatatggattctccatattaaaatggtaa

SEQ ID NO: 184 - protein, 586 aa, Bacillus thuringiensis serovar konkukian str. 97-27
MLKEAIYHRPKDNYAYAYDEKTIHIRIRTKRDDVQSTTLIYGDPYEWKDGKWISSSTPMKKTGSTALFDYWFISIEPKFKRLRYGFELKNDTDTLIYAERGFFSTTPNDDVGNFFCFPFIHANDVFKAPSWIKDTVWYQIFPERFANGDHTLNPENTLPWGSAEPTPTNFFGGDFAGIIQNLDYLVKLGISGIYFTPIFKAHSNHKYDTINYMEIDPQFGTKETFKELVQACHTHGIKVMLDAVFNHSGYFFDKFQDVLQNGEQSAYKEWFHIHEFPIRTEPLPNYDTFAFTPYMPKLNTAHPDVKEYLLEVGRYWVREFNIDGWRLDVANEVDHNFWREFRSEIKALNSEVYILGEIWHDALPWLQGDQFDAVMSYPVTNALLSYFANDSIKANEFMKQITESLHSYSMNVNEAAFHLLDSHDTPRILTTCNGDKNKLKLLYVFHLSFIGSPCIYYGDEIGMDGGMDPDCRKCMVWDTEEQDHTLFTHVQTLISLRKQYKAFGGHGTFQFIEANDEYNYISYTKTYEDETIFFVLNPTNSDITASLPLHVTGKKIINIYTNEEFSAEASVLQVTLPPYGFSILKW

SEQ ID NO: 185 - DNA, 1710 bp, Leifsonia xyli subsp. xyli str. CTCB07
  CDS (1)..(1710): transl_table=11
gtgagtttcaccgcaccgatcacgcttcccgggctcaccctcgacccgcagtggtatcgccgatccgtcttctacgaggtgatggtccgctccttcgtcgacagcaacggcgacggctccggcgatctcgcgggtctgacctccaaactcgactacctgcagtggctcggcatcgacgcgctctggctcccgccgttcttccagtcccccctgcgcgacggcggctacgacgtgagcgacttccgcgcgatcctgcccgagttcggaaccatcgacgagttccgcgacctggtcaccaaggcgcacgagcgcaacatgcggatcatcatcgacctgccgatgaaccacacctccgaccagcacgagtggttccagcaatcgcggtccaacccggaagggcccttcggcgatttctatgtctggaacgagaccgacgacaagtacccggacatccgcatcatcttcgtggacaccgaggactccaactgggccttcgacgaggcgcgtcgccagtactactttcaccggttcttctcgcaccagccggacctcaacttcgagaaccccgccgtacacgacgcaatgttcgacatcgtccggttctggctcgacctcggcgtcgacggcttccggctcgacgctatcccctacctctacgagtcggacgagggcaacggcgagggcgagccgcccacgcacgagttcatcaagaggctccgcgaggtggtcgatcgggagtacccgggccggatgatggtcgccgaggccaaccagtggccgcgcgaagtcgctgccttcttcggcagcgaggaggagccggagtgtcacatggccttcgacttcccggtgatgccgcgtatcttctacgcgctccgctcgcaacaggcctccgagctcatccacgtgctctccgagaccacggacgtgcccgatgggtacgcctggggcgtgttcctgcgcaaccacgacgagctgacgctggaaatggtaagcgaggagtaccgccaggccatgtacggctggtatgcctacgacccgcgcatgcgcgccaacatcggcatccgccggcggctcgcgccgctcctggacaactcgcgcgccgaactcgaactcgcccacgccctcctcttctccctcgccggcagcccgtttctctactacggcgacgagatcgggatgggcgacaacatctggctgcccgatcgcgacagctcgcgcacgccgatgcagtggacccccgaccgcaacgccggtttctccagcgccgacccgggcaaactcttcctcccggtcgtccagtcgctcgtctatcactacaaccaggtgaatgtggaggcgcagctcgcgcagtcgcgctcgctgctgcactgggtgcgcaacgtcatccatgtgcggaaagcgcatcccgtgttcggtctgggcgacatgcgtgtgctgccgaccaaccacgagtcggtgctggccttcgtgcggacgtacgagggcagcggcagccacttcggcgaccagccggaggatgtgctgtgcgtgttctcgttcgcgcacaatccggtctccgtcaccctcgaagcgccggagttcgccggtcggacactgtacgatctgttcggcggcgcagagttcccgaccgtcgccgaggacggccgcttcaccctgaccctcggcacccagagcttctactggctgcacatcgaaccgcgccgcgattaa

SEQ ID NO: 186 - protein, 569 aa, Leifsonia xyli subsp. xyli str. CTCB07
MSFTAPITLPGLTLDPQWYRRSVFYEVMVRSFVDSNGDGSGDLAGLTSKLDYLQWLGIDALWLPPFFQSPLRDGGYDVSDFRAILPEFGTIDEFRDLVTKAHERNMRIIIDLPMNHTSDQHEWFQQSRSNPEGPFGDFYVWNETDDKYPDIRIIFVDTEDSNWAFDEARRQYYFHRFFSHQPDLNFENPAVHDAMFDIVRFWLDLGVDGFRLDAIPYLYESDEGNGEGEPPTHEFIKRLREVVDREYPGRMMVAEANQWPREVAAFFGSEEEPECHMAFDFPVMPRIFYALRSQQASELIHVLSETTDVPDGYAWGVFLRNHDELTLEMVSEEYRQAMYGWYAYDPRMRANIGIRRRLAPLLDNSRAELELAHALLFSLAGSPFLYYGDEIGMGDNIWLPDRDSSRTPMQWTPDRNAGFSSADPGKLFLPVVQSLVYHYNQVNVEAQLAQSRSLLHWVRNVIHVRKAHPVFGLGDMRVLPTNHESVLAFVRTYEGSGSHFGDQPEDVLCVFSFAHNPVSVTLEAPEFAGRTLYDLFGGAEFPTVAEDGRFTLTLGTQSFYWLHIEPRRD

SEQ ID NO: 187 - DNA, 1683 bp, Bacillus licheniformis ATCC 14580
  CDS (1)..(1683): transl_table=11
atggcaagggcatggtggaaagaggcagtcgtttatcaagtgtatccgcgcagttttatggattcgaacggggatggcgtcggagatatcaacgggatcagagagaagcttccgtatatcagggagctcggggcagatgccatttggatttgtccggtctttgattctcccaatgcagataacggctacgacatcagggattatcaaagcatcatgccggaatttggcacgatggacgactttgacgaactattaactgaagcgcatcagctcggaatgaaactgatcatcgatcttgtcatcaatcatacgagcgatgaacatccttggtttatcgaatcaagagcagagcggaattccgggaaacgggactggtatatttggcatgacggaaaggacggaagcgaaccgaacaactgggaaagcatattcggcggctcagcctggacttatgacgaaaaaacagagcaatattatctgcacctttttcacgaaaagcagcctgatctgaattgggaaaacagtgatatgcgaagcgctctttatgacatgatcaactggtggcttcaaaaaggaatcgacggattcagggttgacgcgatttcgcacattaagaaaaaagaagggctgccggatctgccgaatccggaagggcgccctttcgtgccttcatttgcttatcatatgaatgtcgaagggattatggcgttattgcaggatgtaaaagagaatacgttcgccgggtatccacatatcatgacagtcggcgaagcaaacggtgtcagcgctgaagaagcggaggactgggttggagaaccaaacggtatattcagcatgatttttcaatttgaacacctcgggctttgggatattgaaggcggagaacccgatatccccgaactcaagcggattttgtcaaactggcaatctgctcttgaaggaaaaggctggaacgcgctttttatcgaaaatcatgatcagccccgggccgtttcagtttggggagatgacgggaaatacagaacagtcagcgcgaaggccttagctgcaatgtattttttgatgaaaggcaccccgtttatttatcaagggcaggaaatcggaatgacaaacgcgattttcttagatatagacgattatgatgacgtctcgattaaaaattattaccggattcaaaaagaaaagggccgctcacacgaagacatcatgaaggcggtatggaaaaagagcagggatcacgcgcgcacgcctatgcaatggactgatcggccaaatgccggctttaccaaaggggaaccgtggctgcgcatgaacgaaaattacaagctgatcaatgtcgttcatcagcagcatgacccccggtcggtctatcatttttataaacggttaatcgcaatcagaaaacggtatgacgtcttcatcgacggatcatataaactgcttctggctgaggatcggcagatttttgcatacttgcgaaagcttgaagaagaaaccgccatcgtgatcgtgaacctcagcgcacgccaggcgttttaccatcatcccgcatatccgttatgttcgaacggactgctgctgtcaaacttggatatcaacgcgcacaagcacctcacatctttcatgatgagaccctatgaggcgcgcgtttatttgatcagacaggaaatcggcgatttgtaa

SEQ ID NO: 188 - protein, 560 aa, Bacillus licheniformis ATCC 14580
MARAWWKEAVVYQVYPRSFMDSNGDGVGDINGIREKLPYIRELGADAIWICPVFDSPNADNGYDIRDYQSIMPEFGTMDDFDELLTEAHQLGMKLIIDLVINHTSDEHPWFIESRAERNSGKRDWYIWHDGKDGSEPNNWESIFGGSAWTYDEKTEQYYLHLFHEKQPDLNWENSDMRSALYDMINWWLQKGIDGFRVDAISHIKKKEGLPDLPNPEGRPFVPSFAYHMNVEGIMALLQDVKENTFAGYPHIMTVGEANGVSAEEAEDWVGEPNGIFSMIFQFEHLGLWDIEGGEPDIPELKRILSNWQSALEGKGWNALFIENHDQPRAVSVWGDDGKYRTVSAKALAAMYFLMKGTPFIYQGQEIGMTNAIFLDIDDYDDVSIKNYYRIQKEKGRSHEDIMKAVWKKSRDHARTPMQWTDRPNAGFTKGEPWLRMNENYKLINVVHQQHDPRSVYHFYKRLIAIRKRYDVFIDGSYKLLLAEDRQIFAYLRKLEEETAIVIVNLSARQAFYHHPAYPLCSNGLLLSNLDINAHKHLTSFMMRPYEARVYLIRQEIGDL

SEQ ID NO: 189 - DNA, 1764 bp, Bacillus licheniformis ATCC 14580
  CDS (1)..(1764): transl_table=11
atgatggaatatgcagcgatacatcatcagcctttcagctctgatgcctattcttacaatggacggacattgcacatcaagatccgtacaaaaaaggatgatgccgaacacgtccgcttggtttggggcgatccttacgaatacaccggcggcacatggaaagcgaacgagcttgcgatggcgaaaattgccgcaacaagcacccatgattactggtttgccgaagtggcgcctccattcaggcgtctgcaatacggatttatcctgacaggcgctgatgatcgagacactttttacggaagcaatggtgcatgtccgtttgccgggaaagcggcggatataggcaaacactgttttaaatttccgtttgttcatgaggcagacacgtttgatgcacctgactgggtcaaatcaaccgtctggtatcaaatttttccggagcgctttgccagcgggcgggaagatttgtctccggaaaacgctttgccatggggaagcaaagatcctgaggcgcacgattttttcggaggggatttgcaggggatcatggacaagctggactatttggaagacttgggggtaggcggaatctatttgacgccgatctttgccgcgccttccaaccataaatacgacacattggactattgctccatcgatccgcattttggcgatgaggagctctttcgcacgctggtcagccggattcacgagcggggaatgaaaatcatgcttgatgctgtttttaaccacattggcagcgcttcgcaagagtggcaggatgttgtcaaaaacggtgaaacgtcccgctataaagactggttccatattcattctttccctgttaaagaaggcagctatgatacatttgcgtttactcccgagatgccgaagctcaatacggccaacccggaagttcaggcttatttgcttgatattgcgctgtactggatccgcgaatttgatatcgacggctggcgtttggatgtggcaaatgaagttgatcatgcgttttggaagaaattccggcaagccgtcacggcagaaaagcccgacatttttatattgggcgaaatctggcatcaggctgatccgtggcttagaggagacgaatttcattcggtcatgaactacccgttcacagaaccgatgattgactattttgcagacggatcgatttcagcttcgcaaatggccagccgcatcaattcgcatttaatgagcgggatgaagcaggtcaatgaggtgatgtttaatttgctggacagtcatgacacgaagcggattttgacaagatgcggaggagatgacaaaaaggtgcgctctcttttggcattcatgtttgctcagacaggctcgccgtgcatttattacggaacggaagtcgggcttgacggcggcgatgatccattgtgccggaagtgcatggtttgggaagaggaaaaacagaatcaagagatgctcgcatttatgaaacggctgatcgctttgcgaaaacaagagaatgatgtattgacttatggcgcgcttgagtggaagctggttgatgaccaaaacgattttgtcagtttttctcgaacgcatgaaggaaaagagctgatctacttcttccaccagggcagcgaggtgcgccgtgtcagattgcgggatttgaagattgcaagcgataaaagaatatacgatgcgtggacggaagaagcgcttcagcatgatgatgtggtcgacattcagccaggcggatttttcattttgggggcggtctaa

SEQ ID NO: 190 - protein, 587 aa, Bacillus licheniformis ATCC 14580
MMEYAAIHHQPFSSDAYSYNGRTLHIKIRTKKDDAEHVRLVWGDPYEYTGGTWKANELAMAKIAATSTHDYWFAEVAPPFRRLQYGFILTGADDRDTFYGSNGACPFAGKAADIGKHCFKFPFVHEADTFDAPDWVKSTVWYQIFPERFASGREDLSPENALPWGSKDPEAHDFFGGDLQGIMDKLDYLEDLGVGGIYLTPIFAAPSNHKYDTLDYCSIDPHFGDEELFRTLVSRIHERGMKIMLDAVFNHIGSASQEWQDVVKNGETSRYKDWFHIHSFPVKEGSYDTFAFTPEMPKLNTANPEVQAYLLDIALYWIREFDIDGWRLDVANEVDHAFWKKFRQAVTAEKPDIFILGEIWHQADPWLRGDEFHSVMNYPFTEPMIDYFADGSISASQMASRINSHLMSGMKQVNEVMFNLLDSHDTKRILTRCGGDDKKVRSLLAFMFAQTGSPCIYYGTEVGLDGGDDPLCRKCMVWEEEKQNQEMLAFMKRLIALRKQENDVLTYGALEWKLVDDQNDFVSFSRTHEGKELIYFFHQGSEVRRVRLRDLKIASDKRIYDAWTEEALQHDDVVDIQPGGFFILGAV

SEQ ID NO: 191 - DNA, 1620 bp, Methylococcus capsulatus str. Bath
  CDS (1)..(1620): transl_table=11
atgacggacgggaacggcacgctggcctggtggcagaccggcatcatctaccagatctatcccctttccttccaggacagcgacggcgacggcaggggtgatcttcccggcatcctccaccggctcgactacctggccgacctgaacatcgccgccgtctggctgtcgcccgtcttcgcctcgccgatgcgggacttcggctatgacgtggctgactacacgtccatccatccctggttcggaaccctgagcgatttcgaccggctgctggccggcttgcacggccgtggcatcaagctgatcctggacctggtgccgaaccacacctccgaccggcacccctggttcctggaaagccgaagttcgcgcgacaaccctagacgcgactggtacctctggcgcgatccggcaccgggcggcgggccacccaacaactggctgagctttttcggtggcccggcctggacctacgacgagaccaccggacaatactatctgcaccagttcacgccggagcagccggagctgaacctgcgccacccggccgtgctggaggcgatgctggaggtgatgcggttctggctggatcgaggcgtggacggcttccgggtcgacgtgccctggctgctgatcaaagacgccgggttccgagacgaaccggaaaatccggcctgggacggcatcgatccgcacggccggctgctccacatccatacggcgcatcagcccgaactgcaccgcatcatccgggccatgcgcgcggtcgtcgacggctatcccggcgagcgggtcttgatcggggagacaaacgtgccggaggaagaactcgtcaagtactatggcgcggcacgggacgaattccacctacccttcaacttccggctgatccatgccccctgggacgcgcggaaaatccggcagatggtcgaaacttacgaagcgatcctcccccaaagggcctcgcccgcctgggtgctcggcaaccatgaccagccccgcatcgccagccgcttcggtcccgacgcggcccgtgtcgccaccatgctgctgctgaccctgcgtggcacaccgacctgctattacggcgacgagttggggatggagaacggggtgatcccaagggaccgcatccgtgatccgcaggcattgaatcagcccgggatttcgggcgtgttcaatcgcgatgaggcacggaccccgctgccttgggacacctcgcccaatgccggcttcgcgcccgaaggcgtcgacccctggctgccgttgggggaggactggcccatgagaaacgttgcccggcaggcggcggacccccgctccatgctggcgctcttcagggctctgaccagactgcgccaatgccacccggccttgagccatggcagttacgaaagcgtggacacgaaggccgacggcgtcttcgcctacaagcggacggccggcgccgaacgcctcctcatcgtgctcgatttcgccggcagtgaacatctcctggactcgggcgaactcgccgatggcgcggagattctgctgagcaccggcatgcggcgcaccggccgggtcgatctgcggcggctccgtttgctctccaatgaaggtctcatactgaaaatatcttga

SEQ ID NO: 192 - protein, 539 aa, Methylococcus capsulatus str. Bath
MTDGNGTLAWWQTGIIYQIYPLSFQDSDGDGRGDLPGILHRLDYLADLNIAAVWLSPVFASPMRDFGYDVADYTSIHPWFGTLSDFDRLLAGLHGRGIKLILDLVPNHTSDRHPWFLESRSSRDNPRRDWYLWRDPAPGGGPPNNWLSFFGGPAWTYDETTGQYYLHQFTPEQPELNLRHPAVLEAMLEVMRFWLDRGVDGFRVDVPWLLIKDAGFRDEPENPAWDGIDPHGRLLHIHTAHQPELHRIIRAMRAVVDGYPGERVLIGETNVPEEELVKYYGAARDEFHLPFNFRLIHAPWDARKIRQMVETYEAILPQRASPAWVLGNHDQPRIASRFGPDAARVATMLLLTLRGTPTCYYGDELGMENGVIPRDRIRDPQALNQPGISGVFNRDEARTPLPWDTSPNAGFAPEGVDPWLPLGEDWPMRNVARQAADPRSMLALFRALTRLRQCHPALSHGSYESVDTKADGVFAYKRTAGAERLLIVLDFAGSEHLLDSGELADGAEILLSTGMRRTGRVDLRRLRLLSNEGLILKIS

SEQ ID NO: 193 - DNA, 1866 bp, Photobacterium profundum SS9
  CDS (1)..(1866): transl_table=11
atgaaaacgccatttctttaccatggacaggatagcgcctggcttactcctacagacaacacgcttaacgtaacaatggtcagtgatgttgatacactgatatcagctatctttattcgatgtgaacccgataatgaagaactattaattgatatggaacgcggtagaacccaaggtcgcctgcaatactggcacgggaaattaccgttcaattcagataaagacaccactttttatacctttaaagtgatgcaaaacagtcgtcaatggtggctacacggttgtggcgtgtcaccgcgagtaccgggtaaagaaaagcacttcaaattcaataaccagcatcaaccgccagcttgggttaaagaacagattttctatcaagttttcccagaccgtttttcaaatgcaaacccatcaatcagtgttcaatctaatgaatactgtttacgtggcacagaaaaaccgacaatagcaaaagcatggggtgaatcagcatcaaaccatgattcgagtggaccaagcgaattcttcggaggcgacttacaaggtattcacaataagattgattacttacaagaattaggtgtaaccgcactctatttgaatccgatatttaccgcgcccagtaatcataaatacgatacaacggattacctcaatatcgatcctcatttaggcacgaatgagcaatttgccaacatggtggcagatctgcatcaacgtaatatgaagattatgctagatgccgtgtataaccatacctcagtcgaccacccttggttcgatatgtatcaacgtaataccgcagaccaagctgtgggcgcatacgatcatcctaactctacttaccgtcagtattatcaatttaccgataacagtaacgaatacgttggctggaatggtatatcaacgctacctaaactgaatttttctaatcctgaagtacaggattatatctatgcgggtgacgacgcggtaatcaaacactggctaaaaccaccctataatatagatgcatggcgtttcgatgttatccatatgctaggtgaaggcaaaggcgcacgtaataatgctcattttgttaaatccttccgcaatgcagccaagtcggtcaatcctgagtgctatgtgttaggcgaacatttctttgaagcgtctaactggcttcaaggtgatcaagaagacggtgctatgaactattacggttttgctcaccctcttcgtgcttttttttctcaaaaagacattgcctatcacgcatgccaaatcaatgctgtagaattagtagaatggctaaacgaagcgcgtacaaaattaccgtggttgaatcagctctctcagcttaaccagctagatagccacgatacaatgcgttttttaaccatggtggataacaacacagaaacgatgcacctagcattaatgatgctttttgcttatgtaggcacaccgtgtgtttactacggtacagaagttgaattacaaggcggtcaagatccagataaccgtcgttgtttcccgtgggaaagaacagagcaagaacaaaaaccacaaacattcagttatttgcagcaactcattgctgtcagaaaatcatcaaccgcccttcaatccggcagtgttcagtggttattggctgagaaccaatattttgcttttgctagaacgacagaaacagagcatgttatttgccttattaataacagtgaatcagctaaaacacttcatttaccggtttggcaattaggcattgagtcgggttctttacgcgacctgttaactgatgatgaatggcatattagcgaaggaagtgtatctgtcacattggcaggcaaagaaggaatattactgactgtcagcgaataa

SEQ ID NO: 194 - protein, 621 aa, Photobacterium profundum SS9
MKTPFLYHGQDSAWLTPTDNTLNVTMVSDVDTLISAIFIRCEPDNEELLIDMERGRTQGRLQYWHGKLPFNSDKDTTFYTFKVMQNSRQWWLHGCGVSPRVPGKEKHFKFNNQHQPPAWVKEQIFYQVFPDRFSNANPSISVQSNEYCLRGTEKPTIAKAWGESASNHDSSGPSEFFGGDLQGIHNKIDYLQELGVTALYLNPIFTAPSNHKYDTTDYLNIDPHLGTNEQFANMVADLHQRNMKIMLDAVYNHTSVDHPWFDMYQRNTADQAVGAYDHPNSTYRQYYQFTDNSNEYVGWNGISTLPKLNFSNPEVQDYIYAGDDAVIKHWLKPPYNIDAWRFDVIHMLGEGKGARNNAHFVKSFRNAAKSVNPECYVLGEHFFEASNWLQGDQEDGAMNYYGFAHPLRAFFSQKDIAYHACQINAVELVEWLNEARTKLPWLNQLSQLNQLDSHDTMRFLTMVDNNTETMHLALMMLFAYVGTPCVYYGTEVELQGGQDPDNRRCFPWERTEQEQKPQTFSYLQQLIAVRKSSTALQSGSVQWLLAENQYFAFARTTETEHVICLINNSESAKTLHLPVWQLGIESGSLRDLLTDDEWHISEGSVSVTLAGKEGILLTVSE

SEQ ID NO: 195 - DNA, 1656 bp, Thermus thermophilus HB8
  CDS (1)..(1656): transl_table=11
gtggagcttttcctggaaaccgaggcgcgggaaggggttctcctttacgagcgggacggggagttgcagaaaaagcccatggcgccttgggagcggggcctaaaggcgcgggtgcccgtccacgcgagccccttccgctactgcttccgcctcccccaaggctacctgggcagccacggcctggagaggaccctgccccgctacgaccgcttcttccacctcctcgccaagccccttcccccggagtgggccctgggggcggtcttctaccagatctttcccgaccgcttccgccaagggcgcccggagcttgcccccaaggagggggcctggctttacggggggaggcccatccgcaagaaggcctggcacgagccccccggggaggacggggcccgggagttctacgggggggacctctttggggtcctcgaggccctcccctacctggaggccctgggggtggaggccctctacctcacccccatcttccaaagcccctccagccaccgctacgacaccgaggactaccaccgggtggaccctcatctaggcggggaggaggcgcttagggcgctttacgaggccctcgaggcccgggggatgaagctcatcctggacggggtcttcaaccacgtgggggcgacccacccctggttccagaaggcccttgaggacccctcctcccccgagcgggggatgttcaccttttatccggacgggagctacgccagcttctggggcgtgaagcacatgcccaagctggactacgcttccgccctcacccaggagcgcttcgtcttcggaaaggaggcccccgtccgctactggatgcgcctcgcccatggctggcggctggacgtggcccactccatcggggaaggggggacgaaccggaagaacgcccgctggctcagggccctggcccgggccgccaaggaggagcgggaggacgccctcgtcttcggggagctctcctacgacaccgtccccacgctgagggcccacaccctggacggggccatgcactacgccggcttcgcccacccggtgatggagtggctctcggggcgggacctccacggaaaccccgtggagctggaggccgaggacctttggcgggccctctttgaccactacgccgcccttcccctccagctccgccacgcgatgtacaccctcctctcctcccacgacatcccccgggccctctggcgcctcaggggggacaaggagcgcttcaagaccgcctacgccctcctctttgccttccccggaagccccgccgtctactacggggacgaggtgggcctctcccagcccaacccctacgaggtctggcggggagacccctactgccgcgcccccttcccctgggacgaggccctttgggacaaggacctcctcgccttcctccggcgcctcatcctcctcaagaagacccaccccgccttgaggctcggggggctcctccccctcaaggcccctccgggggtcctggccttcaggcggcgccaccgggggagggaggtctgggcctttttcgccaaggaagaggtgcgcctttcccttccccggggggtggacctcctttcgggaagggaggtggcgggggaggtggaggcgcggtacctcctcctggagcctttagaatga

SEQ ID NO: 196 - protein, 551 aa, Thermus thermophilus HB8
MELFLETEAREGVLLYERDGELQKKPMAPWERGLKARVPVHASPFRYCFRLPQGYLGSHGLERTLPRYDRFFHLLAKPLPPEWALGAVFYQIFPDRFRQGRPELAPKEGAWLYGGRPIRKKAWHEPPGEDGAREFYGGDLFGVLEALPYLEALGVEALYLTPIFQSPSSHRYDTEDYHRVDPHLGGEEALRALYEALEARGMKLILDGVFNHVGATHPWFQKALEDPSSPERGMFTFYPDGSYASFWGVKHMPKLDYASALTQERFVFGKEAPVRYWMRLAHGWRLDVAHSIGEGGTNRKNARWLRALARAAKEEREDALVFGELSYDTVPTLRAHTLDGAMHYAGFAHPVMEWLSGRDLHGNPVELEAEDLWRALFDHYAALPLQLRHAMYTLLSSHDIPRALWRLRGDKERFKTAYALLFAFPGSPAVYYGDEVGLSQPNPYEVWRGDPYCRAPFPWDEALWDKDLLAFLRRLILLKKTHPALRLGGLLPLKAPPGVLAFRRRHRGREVWAFFAKEEVRLSLPRGVDLLSGREVAGEVEARYLLLEPLE

SEQ ID NO: 197 - DNA, 1767 bp, Geobacillus kaustophilus HTA426
  CDS (1)..(1767): transl_table=11
atgaggaaagaagccatccaccaccgctcaaccgaccatttcgcttatgcttatgacagcgagacgctccatctccggcttcaaacaaagaaacatgatgtcgaccacgtcgagctgctttttggcgacccgtacgaatggcacgatggcgcctggcagtttcaaacgatgccgatgcggaaaacgggaagcgacgggttgtttgactattggctcgccgaagtcaaaccgccatatcgacggctgcgctatgggtttgtgcttcgagctgggggcgagaaactggtctatacggaaaaaggattttaccatgaagctccgagcgacgacaccgcttactacttttgcttcccctttcttcatcgggtcgacctattccaagcgccgggctgggtaaaagacacagtatggtatcaaattttccccgagcggttcgccaacggcaacccggccatcagtccgaaaggggcgcggccgtggggaagcgaggacccgacgccgacgagctttttcggcggcgacttgcaaggaatcatcgatcaccttgactatttggctgatctcggtattaccggcatttacttgacgccgattttccgcgcaccgtccaatcataaatacgacaccgctgattattttgaaatcgacccgcactttggggacaaagagacattgaaaacacttgtcaaacgctgccatgaaaaaggaatccgcgtcatgctcgatgcggtcttcaatcattgcggctatgagtttggcccgtttcaagatgtgttaaaaaacggcgcagcgtctaggtataaagattggttccatattcgcgagtttccgctccaaacggagccgcgcccgaattacgacacgtttgcgttcgtgccgcaaatgcccaagctcaacaccgcccatccggaagtgaagcgctacttgcttgatgtcgcgacgtactggattcgcgagtttgatattgacggctggcggctcgatgtggcaaacgaaatcgatcaccaattttggcgcgaattccgtcaggcggtgaaggcgctaaagcccgatgtgtacattctcggcgagatttggcatgatgccatgccttggctgcgcggcgaccagtttgacgccgtcatgaactacccgttggcggacgcggcgctccgctttttcgcgaaagaggaaatcagcgcccgccagtttgccgatatcatgatccgacttcttcattcgtatccgaaacaggtgaacgaagcggcattcaacttgcttggcagccatgatacaccaaggctgctcactgtttgcggcggcgacgtccgcaaagtgaagttgttgtttttgttccagctcacgttcactggttcgccgtgtatttactatggcgatgagatcggcatgacgggtggaaacgatccggaatgccggaaatgtatggtgtgggatccggagcaccaaaaccgcgaactgttggcgcatgtcaagcggctgattgcgctaaggaagcagcaccgggcgctccggcgcggagatgtctcctttctttccgccgacgacaaccctaaccatctcgtgtatgaaaaaattgacggcgctgaaaccgtgctcgtcatcatcaaccgaagcaatgatgccgccgacattccgctcccgctcgaccttcgcggaaaatggcttgttgacctcttgaccggagagcggtttgcggccgaggcggaaacgctttgcgcctctttgcctccgtatgggtttgtgctctataaagttgaaagctggtaa

SEQ ID NO: 198 - protein, 588 aa, Geobacillus kaustophilus HTA426
MRKEAIHHRSTDHFAYAYDSETLHLRLQTKKHDVDHVELLFGDPYEWHDGAWQFQTMPMRKTGSDGLFDYWLAEVKPPYRRLRYGFVLRAGGEKLVYTEKGFYHEAPSDDTAYYFCFPFLHRVDLFQAPGWVKDTVWYQIFPERFANGNPAISPKGARPWGSEDPTPTSFFGGDLQGIIDHLDYLADLGITGIYLTPIFRAPSNHKYDTADYFEIDPHFGDKETLKTLVKRCHEKGIRVMLDAVFNHCGYEFGPFQDVLKNGAASRYKDWFHIREFPLQTEPRPNYDTFAFVPQMPKLNTAHPEVKRYLLDVATYWIREFDIDGWRLDVANEIDHQFWREFRQAVKALKPDVYILGEIWHDAMPWLRGDQFDAVMNYPLADAALRFFAKEEISARQFADIMIRLLHSYPKQVNEAAFNLLGSHDTPRLLTVCGGDVRKVKLLFLFQLTFTGSPCIYYGDEIGMTGGNDPECRKCMVWDPEHQNRELLAHVKRLIALRKQHRALRRGDVSFLSADDNPNHLVYEKIDGAETVLVIINRSNDAADIPLPLDLRGKWLVDLLTGERFAAEAETLCASLPPYGFVLYKVESW

SEQ ID NO: 199 - DNA, 1542 bp, Geobacillus kaustophilus HTA426
  CDS (1)..(1542): transl_table=11
atggaaatggggaaccggctctttatgctgctcgtccttccgttccttcttttttatgcctggccggtgcaggcggcggaaaaagaagaacggacgtggcaagatgaagccatttatttcattatggtcgaccggtttaacaatatggatccgacaaacgaccagaacgtgaatgtgaacgatccgaaagggtatttcggcggcgacttgaaaggggtgacggcgaaactcgattacatcaaggagatgggatttaccgccatttggctgacgccgatttttaaaaacatgccgggcggttatcatggctattggattgaagatttttatcaagtcgatccgcactttggcacgctgggcgatttgaaaacactcgtcaaagaagcgcataagcgcgacatgaaagtcattttggattttgtcgccaaccatgtcggttacaatcacccatggttacatgacccaacgaaaaaagattggtttcacccgaaaaaagagattttcgactggaacgaccaaacacagcttgaaaacggctgggtgtatgggttgcctgatttggcgcaggaaaatccagaggtcaaaacgtatttaattgacgctgccaaatggtggatcaaagaaacggacattgacggctatcgcctcgatacggtgcgccatgtgccaaaatcattttggcaggagttcgccaaagaagtgaaatcggtgaaacaagactttttccttcttggcgaagtgtggagcgacgatccgcgctatattgccgagtacggccaatacggcatcgacggttttgtcgattatccgctgtatggcgcggtgaagcagtcgcttgctaggcgcgatgcgtcactgcgcccgctgtatgacgtctgggaatacaacaaaacgttttacgaccgcccgtacttgctcgggacgtttttggacaatcacgataccgtgcggtttacgaaactttcgattgacaaccgcaacaatccgatttcacgcatcaagctggcgatgacgtatttgttcaccgcccccggcatcccgatcatgtattacggaacggaaatcgccatgaacggcggcgaagacccggacaaccgccgcttgatggatttccgcgccgatccggagatcatcgattacttgaaaaaaatcggcccgctccgccaacagctgccgtctttgcggcgcggcgattttacgctcctgtatgaaaaagacggcatggcggtgtggaaacggcaatatgaagatgaaacaacggttatcgccatcaacaacacgggcgaaacgcagcacgttcacctaacgaacgaccagctgccaaaaaacaaggaactgcgcggctttttattggacgatctcgtccgcggcgatggcgacggatacgatcttgtgctcgaccgcgaaacggcggaagtgtacaaactgcgggaaaaaacagggatcaacgttccgtttatcgccgccatcgtatcggtttacgtgttgtttcttttgtttttgtatttggtgaaaaaacgggcgaagcggatgccggaatag

SEQ ID NO: 200 - protein, 513 aa, Geobacillus kaustophilus HTA426
MEMGNRLFMLLVLPFLLFYAWPVQAAEKEERTWQDEAIYFIMVDRFNNMDPTNDQNVNVNDPKGYFGGDLKGVTAKLDYIKEMGFTAIWLTPIFKNMPGGYHGYWIEDFYQVDPHFGTLGDLKTLVKEAHKRDMKVILDFVANHVGYNHPWLHDPTKKDWFHPKKEIFDWNDQTQLENGWVYGLPDLAQENPEVKTYLIDAAKWWIKETDIDGYRLDTVRHVPKSFWQEFAKEVKSVKQDFFLLGEVWSDDPRYIAEYGQYGIDGFVDYPLYGAVKQSLARRDASLRPLYDVWEYNKTFYDRPYLLGTFLDNHDTVRFTKLSIDNRNNPISRIKLAMTYLFTAPGIPIMYYGTEIAMNGGEDPDNRRLMDFRADPEIIDYLKKIGPLRQQLPSLRRGDFTLLYEKDGMAVWKRQYEDETTVIAINNTGETQHVHLTNDQLPKNKELRGFLLDDLVRGDGDGYDLVLDRETAEVYKLREKTGINVPFIAAIVSVYVLFLLFLYLVKKRAKRMPE

SEQ ID NO: 201 - DNA, 4983 bp, Geobacillus kaustophilus HTA426
  CDS (1)..(4983): transl_table=11
ttggccaaacaaaggagaagggagcgggggatgatcaagagggcaaggagaatgctatcattggttttggcatcggtgttgttgctggcattgactcctttccaggcggttgccgctgcgaacgaggcaggaagttctagcgctctagggaatggagcgcatcggtggacggccgaatccacggcctcgcaaccacggacgatcacgctcgtcggcacgctacaagatgaattgggccatacggcggaatgggatccgggggcattggcgacgaggatgcatgatgaagggaatgggctttatacattcaccgggacgctgccggctgggacgtatgagtacaaaattgcggtcaatggcagctgggatgaaaactacggagccggcggccgcaatggcgacaatctggtgttgaagctggatcggcaaaccgaggtgacgttttattaccatgaccggacgcatgcgatcgcggattcgacatggtatacggcgattgcgaaggagaaacagccgcgcctcgtcgggacggtgctgccggccatcggctatgagggggagaacgatggatggaccccggggacatcgacggcgctgttgaccgatgacgatttcgactcggtgtacacgtttacggcgcaggtgccgaaagggtcgtatgaatataaaatcgtcctcggaaacaattggaacgagagctacccacaagagaatgcacgcttaaccgttttggaaacgacgaccattacattcttcttcaatgcgaaaacaaaagaggtgtacaccgactacaaccccaatggctctgacggtgttgttcagaaagaccgattaaaacacaatacatgggatacgctgtaccgccagccgtttggtgcggtgaaagcgggaacgaaggtgacgcttcgtctggcggcgaaaaaaggcgatttgacgaaggcggatgtgtatgtgaaaaatgcgacgaccggaaccgccaaagtctacacgatggaaaaagtcagcgtgctcggggatgatgaatattgggaggtggcgttcaccccttcgacgcccggggtgtacgggtataaatttatagcgcaagatgccggaacgaaagtggaatacggcgaagatacgcaagaagggcaatgggggaaagcggtggacagccgcgcggagctgtttcaactgacggtgtatgatccggattacaggacgcccgactggatgaaagaagcggttgtgtatcaaattttcccggatcggttctttaatggcaacccttcaaatgataacagcaagcagcaggcacgcggggcgcagccgattgagcatcgcgattggtcggatttgcccgataatccgcgcctgaaagggacgagcggctacgatggcgacggcgaatggtcgaatgactttttcggcggagatgtggccgggattgaacagaagttggattacttgcagtcgcttggggtgaacacgatttacttaaacccgatcgccaatgcaccgtcaaaccataaatacgatgcaagcaattacaaagaattggatccgatgtttgggtctccggaagagtttcaatcatttgttcaggaactggcgaaacgggggatgcatctcatcttagacggcgtgttcaaccacgtatccgatgattcgatttactttgaccgctatcaccgttatccgacggtcggcgcctatgaatattgggaagcggtttacgatttgatgaacgaaaaaggattgagcgaggaggaagcgcggaaacaggcggaagagaagttcaaacaacaagagcaaacgttcagcccgtatgggtttcatctttggttcaatattgaaaacgaaaaagtcgatggtcgttataagtatcagtcatggtggggctatgacagtctgccggagtttaagtcggtgacgggggaaaaagtgccgaatccgagtgaattgaacaacgatgcgctcgcaaattacattttccgtgaatcggattcggtggcgaaaagctggattgcccgcggcgcctctgggtggcggttggatgtagcgaatgaggtggatccggcgttttggcgcgagtttcgccaagagttgcttcaaggatcgtacgaccgcggcccgacgttaaaagaaggggagcagccgctcattttaggggaaatttgggatgacgcatcgaaatattttctaggcgaccagtacgattccgtgatgaactaccggttccgcggggcggtgcttgactttttgcgaaatgggaatgcagaagaggccgatcagcgactgacggccataagggaagactacccgagcgaagcgttttatgcgctgatgaatttgatcggttcgcatgacacggcgcgggcggtctttctgcttgggaacggaacggattcattcgagcgggcggagtttgatccgaattataatgaagaacttggaaaaaagcggctcaagctagcggcgattttgcagatgggatatccgggggcgccgacgatttattacggtgatgaagcaggggtaagcggctccaaagatccggacaaccgtcgtacgtatccgtggggtaaagaagatcaaaatctgttggcgcactatcggaaagtcggtcaaattcgccagcaccatcaaacgctgttggcccatggcgacatcaagacgttgtatgcgcaaggggatgtatacgtctttgcccgccaatacggtcgtgacgtggcgatcattgccgtcaaccgtggcaatgaggacagaacggtggcgcttgacgtcgcttcgtggctgcccaacggcaccgtgctgacggatgagttgcatgatggcgggaaagctacggtcgctgacggaacgttgacggtcacgattccggccttggacggacggatgatgtttgggacggtgacggcagaaatgcctgccgcggtcagaaatttgcaggcaagcgccgtggttggtggcgtgacgcttacttgggaagggcaagcgtcgaagtatcgggtgtaccaatcaaccattcaaggggctggttatacgttagcggcggaaacgaacgggacttccgtgacgatcgattcgttggcgaacgggaccgcgtattactttgccgttaccgccgtcgatgagaacgggaatgagtcgccaaaggtggaaacgaatcgcgtcgttcctcattatccgctgacgagcgacaatgtccagttcgtgaccacgttaagcgatgccacactcgacttgtcccagccgcaaccaatcgatgtcaaagtgaacatcgacggtgtgacaagcaaaggagcagccgatggattgcaagcggtgttgcaagtgaaagggccgcatgacgaagcatggaaagaatatagagcggtttaccaagggcaagatggcgacgctaatgtgttccgtgccgccttcaccccgcttgtggcagggacgtatacgtatcgctatgcgctgacgaccaaccttggcgaggattgggtgtatacggaagccaaacaagtgacgtttgcggccgactccagcgaccaaaaagcgccggccgaggcgattgcgctgacgccgccgcctgttgagtcagggcaagttcatttgtcatggcagtttgtaggaaaaaatgatgcggatgcatacttgctagtcatcgaacgcaatggaacagtcattcatatgacgacatccatcagcacatcgttcgttgattacggggtcgaaaacggcaccgagtatgcgtacgttgtcaagctgtatgaccgcgctggaaatgtcaccgcgtccaacacggtcaaagtgaagccggacattgtgatggtgaaagtcatttttaaagtcaaagccccagactatacgccgttagatgcccgaattacgattccgaacagtttgaacggctggaacacaggggcatgggaaatgtcgcgcaatggagcggtgacgcctgattggcaatttacaactgaagtgcaagaaggggaaacgatcacgtataagtatgtgaaaggcgggtcgtgggatcaggaagggctggctgatcatacgcctgcagacgttggggatgatgatgtcagttattatggatacggctcgatcggcacggatttgaaagtgaccgttcacaatgaaggaaacaatacgatggttgtggaagaccgcattttgcgctggattgatatgccggtggtcatcgaagaggtgaaaaaacaagggagtcaagtgacgatcaagggcaatgccattaaaaatggcgttttgacgatcaacggtgagcgggtgccgattgatgaccggatgtcattctcgtacacgtttgcgccggccagccatcaaaaagaagtgtcgattcatattgaaccatcggctgaaagcaaaacagccattttcaacaacgacggcggagcgattgcgaaaaacacgaaagattatgtgttgaatttagaaacgaagcaattgcgcgaagggaagttgacaacgccgccaagcaacggcgattctccgggaagcgaaacgccgtcccatgacggaggggcaacaccaggcaacggcacctctccgggcagcggtggtccatcggatggcgcatcccctggggggagcgttccgccgggcggcacagctccaccgggaaacgaagcgcctccatccagaccgccgcaaaaaccgtctccatcgaaaccaaaagagaaaccgagaaagccaaccactcctccaggccaagtgaaaaaagtgtactgggatggcgtggagttgaaaaaagggcaaatcggccgcttgacggtgcaaaagccgatcaatctatggaaacggacgaaggatgggcgccttgtgttcgtccgcatcttacagcctggggaagtataccgcgtctacgggtatgatgcgcgcttcggcgggcagtacgcagtcggcggcgggtattacgtgaccgacatcgacacgcacatccgctatgaaacgccgtcaaaggagaagttgaagttggtgaatggggagtaa

SEQ ID NO: 202 - protein, 1660 aa, Geobacillus kaustophilus HTA426
MAKQRRRERGMIKRARRMLSLVLASVLLLALTPFQAVAAANEAGSSSALGNGAHRWTAESTASQPRTITLVGTLQDELGHTAEWDPGALATRMHDEGNGLYTFTGTLPAGTYEYKIAVNGSWDENYGAGGRNGDNLVLKLDRQTEVTFYYHDRTHAIADSTWYTAIAKEKQPRLVGTVLPAIGYEGENDGWTPGTSTALLTDDDFDSVYTFTAQVPKGSYEYKIVLGNNWNESYPQENARLTVLETTTITFFFNAKTKEVYTDYNPNGSDGVVQKDRLKHNTWDTLYRQPFGAVKAGTKVTLRLAAKKGDLTKADVYVKNATTGTAKVYTMEKVSVLGDDEYWEVAFTPSTPGVYGYKFIAQDAGTKVEYGEDTQEGQWGKAVDSRAELFQLTVYDPDYRTPDWMKEAVVYQIFPDRFFNGNPSNDNSKQQARGAQPIEHRDWSDLPDNPRLKGTSGYDGDGEWSNDFFGGDVAGIEQKLDYLQSLGVNTIYLNPIANAPSNHKYDASNYKELDPMFGSPEEFQSFVQELAKRGMHLILDGVFNHVSDDSIYFDRYHRYPTVGAYEYWEAVYDLMNEKGLSEEEARKQAEEKFKQQEQTFSPYGFHLWFNIENEKVDGRYKYQSWWGYDSLPEFKSVTGEKVPNPSELNNDALANYIFRESDSVAKSWIARGASGWRLDVANEVDPAFWREFRQELLQGSYDRGPTLKEGEQPLILGEIWDDASKYFLGDQYDSVMNYRFRGAVLDFLRNGNAEEADQRLTAIREDYPSEAFYALMNLIGSHDTARAVFLLGNGTDSFERAEFDPNYNEELGKKRLKLAAILQMGYPGAPTIYYGDEAGVSGSKDPDNRRTYPWGKEDQNLLAHYRKVGQIRQHHQTLLAHGDIKTLYAQGDVYVFARQYGRDVAIIAVNRGNEDRTVALDVASWLPNGTVLTDELHDGGKATVADGTLTVTIPALDGRMMFGTVTAEMPAAVRNLQASAVVGGVTLTWEGQASKYRVYQSTIQGAGYTLAAETNGTSVTIDSLANGTAYYFAVTAVDENGNESPKVETNRVVPHYPLTSDNVQFVTTLSDATLDLSQPQPIDVKVNIDGVTSKGAADGLQAVLQVKGPHDEAWKEYRAVYQGQDGDANVFRAAFTPLVAGTYTYRYALTTNLGEDWVYTEAKQVTFAADSSDQKAPAEAIALTPPPVESGQVHLSWQFVGKNDADAYLLVIERNGTVIHMTTSISTSFVDYGVENGTEYAYVVKLYDRAGNVTASNTVKVKPDIVMVKVIFKVKAPDYTPLDARITIPNSLNGWNTGAWEMSRNGAVTPDWQFTTEVQEGETITYKYVKGGSWDQEGLADHTPADVGDDDVSYYGYGSIGTDLKVTVHNEGNNTMVVEDRILRWIDMPVVIEEVKKQGSQVTIKGNAIKNGVLTINGERVPIDDRMSFSYTFAPASHQKEVSIHIEPSAESKTAIFNNDGGAIAKNTKDYVLNLETKQLREGKLTTPPSNGDSPGSETPSHDGGATPGNGTSPGSGGPSDGASPGGSVPPGGTAPPGNEAPPSRPPQKPSPSKPKEKPRKPTTPPGQVKKVYWDGVELKKGQIGRLTVQKPINLWKRTKDGRLVFVRILQPGEVYRVYGYDARFGGQYAVGGGYYVTDIDTHIRYETPSKEKLKLVNGE

SEQ ID NO: 203 - DNA, 1689 bp, Azoarcus sp. EbN1
  CDS (1)..(1689): transl_table=11
atgaggacggcaggcgacaacgcgggtggcagggcatggtggaaggaggccgtcgtgtatcagatctatccgcgcagcttcatggattcgaacggcgacgggatcggcgatctgaacggcatcaccgtgcggctcgactacttgaagtcgctcggcgtcgacgtgatctggatctgcccggtgttcagctcgccgaacgatgacaacgggtacgacatcagcgactaccgggcgatcatggacgacttcggcacgatggcggatttcgactgcctgctcgccgaagtccaccgccgcggcatgcggctgatcctcgatctcgtcgcgaaccacaccagcgacctgcacccgtggtttctcgaatcgcgcgcgtcgctgaacaacccgaagcgcgactggtacttgtggcgcgacggcaaggacgggcgcgagccgaacaactgggagagcattttcaagggctcggtgtggaaatacgacgacaagaccggccagtatttcctgcacctgttctcggagcggcagccggacctgaactgggacaacccggaagtgcggaccgcgatctacgaaatggtgcgctggtggctcgacaagggcgtcgacggcttcaggctcgacgccgtcagccacaagaagaaggagccggggctgcccgacatgccgaatccgcacggcctcgattacgtgccgtcgttcgagaagcacatgaacgtcgatggcgtgctcgactacctggacgagttgtgccgccacacgttcgaccactacgacgtgatgaccgtcggcgaagccaacggcgtgtcgccggagcaggccagagcctgggtgggcgaggagcaccggcggctcaacatgatcttccagttcgagcattccgcgctgtggaagaaggcgccgcgcaacgggctcgaccttccggcgctcagggccgtgctgacgaaatggcagaagagtctcgacggcaccggctggaatgcgctgttcctcgaaaaccacgatctgccccgggtcgtttcgcgctggggcgacaccggccgctactggcgtgagagcgcgactgcgctggcaacgatgtatttcctgatgcagggcacgccgttcatctaccaggggcaggaactcggcatgacgaacagccgctttgcggcgctcgatgatttcaacgacgtcctgacgaaaaatcgcttcgcgtcgatgaagcgtgaagggctcgccgagggcgacatcatcgacctgttgtcgatcgtctcgcgcgacaacgcacgcacgccgatgcagtgggacgggtcggcgaacggcgggttcagctccggcacgccgtggctgcgcgttaatccgaacttcaacgagatcaacgccgagctgcaggagcgcaactccgcgtcggtgctgaaccattaccgccgcctcatcgcgctgcgcaaacgcgagcccgggctcgtccatggccactgcgagctgctgatggaggacgacgcgcagatctatgcctacagccgaacgcatggttcgcagcgctacgtgatcatcacgaacatgacgcgcgacgaagcccgataccaccagccggacctgctgctggacggcggcggattgctgctcgcgaaccagccggtcgagccgcacaccccgaccgacagtctgctgctcgagccgtacgaggcgcgcgtgtaccgttttcgctga

SEQ ID NO: 204 - protein, 562 aa, Azoarcus sp. EbN1
MRTAGDNAGGRAWWKEAVVYQIYPRSFMDSNGDGIGDLNGITVRLDYLKSLGVDVIWICPVFSSPNDDNGYDISDYRAIMDDFGTMADFDCLLAEVHRRGMRLILDLVANHTSDLHPWFLESRASLNNPKRDWYLWRDGKDGREPNNWESIFKGSVWKYDDKTGQYFLHLFSERQPDLNWDNPEVRTAIYEMVRWWLDKGVDGFRLDAVSHKKKEPGLPDMPNPHGLDYVPSFEKHMNVDGVLDYLDELCRHTFDHYDVMTVGEANGVSPEQARAWVGEEHRRLNMIFQFEHSALWKKAPRNGLDLPALRAVLTKWQKSLDGTGWNALFLENHDLPRVVSRWGDTGRYWRESATALATMYFLMQGTPFIYQGQELGMTNSRFAALDDFNDVLTKNRFASMKREGLAEGDIIDLLSIVSRDNARTPMQWDGSANGGFSSGTPWLRVNPNFNEINAELQERNSASVLNHYRRLIALRKREPGLVHGHCELLMEDDAQIYAYSRTHGSQRYVIITNMTRDEARYHQPDLLLDGGGLLLANQPVEPHTPTDSLLLEPYEARVYRFR

SEQ ID NO: 205 - DNA, 1770 bp, Bacillus clausii KSM-K16
  CDS (1)..(1770): transl_table=11
atgaaagtagcgatctaccatcgcccgaaaagtgaagatgcctacgcgtatgacaaagatacgatccacattcgtctgcgcacgcgcaaagacgatgctcacgaggtcatgcttatttatggagatccttacgattgggcgggaaacgaatgggtgactgccaaaaaaacaatgacacaagcaggggccgatggagaatatgattattggtttgtggaagtgaagccgccctaccatcgccttcgttacgggttcgaaattaaggcaaaagatgagacgatttactatggagaaagtgggttttgcgatacgcctgcaaaagacattagcgattatttctgttttccgtttatgaatcaagccgatttgtttacaccgcctgaatgggttaaagaaacgatctggtatcaaatctttcctgaacgttttgccaatggcgatcattcccgtgaccctgaaaatacattggcttggggaagtgcaccaccgactgcaaccaattatttcggcggtgaccttcaagggattgtcgatcatcttgattatttgcagaagctaggaattaacggcatttatttaacaccaatctttaaagcgttttccaaccataaatacgatacgattgattatttaaaagtagatccccaatttggagatgaaacgacacttaaactgcttgtcgatgaatgccataagcgcggcattcgtgtcatgcttgatgccgtcttcaaccatgcaggcctgtattttccaccttttcaagatgtactaaaacaccagcaggaatcagaatatagggattggtttcatatccgccaatttcctgttcgagcagaggaaccacctaattacgatacgttcgccttcacgcctttaatgccgaaactaaatacagcaaatgaagcagtaaaggactatttattgaacgtagctacgtattggattaaggagtttgacattgacggttggcgtttagatgtcgccaatgaagtcgaccatgccttctggcgtgagtttcgcaacagagtcaaagcattaaaaccagatttgtatattctcggtgaaatatggcataacgcttacccttggctgcaaggcgaccaattcgatggggtcatgaactacccgctcactgacgcgatttttgactttgtccaacacggcaaaagcgcaaccacttttcaatacgcggtcacaaaacatttgtacagttacccaaaattggtgaacgaagtccagttcaatttgctcggcagccatgacacaccaagaattttaactgtaagtgggggcaacaaaaaattagtcaaactttcctacttattgctgttttcctttcctggctcaccttgtatttattacggggatgaaatcggcatggccggagaaaatgaccctggttgccgcgcgtgcatggtgtgggaggaagaccaacaagatcaggagctattccaatttctgcaaaaactaattaagatccgcaaaactcaccaagcaatgggcacctataacaccttaaaattttatgactctggcactgaggatgtgctgttgtattccacatccgctggcggagagcttcttttatttgcggttaaccgcagtaaacaagaagcaacggtcaaactccctgattcactaaagagccttgcatttgtcgatgtcatttgcgaaagcccattgcaaagcgaagagctccacgttgaaggcgagtgctttttgttccttcattctgtcgacgccaacaaatgcggccaagtagacaagtaa

SEQ ID NO: 206 - protein, 589 aa, Bacillus clausii KSM-K16
MKVAIYHRPKSEDAYAYDKDTIHIRLRTRKDDAHEVMLIYGDPYDWAGNEWVTAKKTMTQAGADGEYDYWFVEVKPPYHRLRYGFEIKAKDETIYYGESGFCDTPAKDISDYFCFPFMNQADLFTPPEWVKETIWYQIFPERFANGDHSRDPENTLAWGSAPPTATNYFGGDLQGIVDHLDYLQKLGINGIYLTPIFKAFSNHKYDTIDYLKVDPQFGDETTLKLLVDECHKRGIRVMLDAVFNHAGLYFPPFQDVLKHQQESEYRDWFHIRQFPVRAEEPPNYDTFAFTPLMPKLNTANEAVKDYLLNVATYWIKEFDIDGWRLDVANEVDHAFWREFRNRVKALKPDLYILGEIWHNAYPWLQGDQFDGVMNYPLTDAIFDFVQHGKSATTFQYAVTKHLYSYPKLVNEVQFNLLGSHDTPRILTVSGGNKKLVKLSYLLLFSFPGSPCIYYGDEIGMAGENDPGCRACMVWEEDQQDQELFQFLQKLIKIRKTHQAMGTYNTLKFYDSGTEDVLLYSTSAGGELLLFAVNRSKQEATVKLPDSLKSLAFVDVICESPLQSEELHVEGECFLFLHSVDANKCGQVDK

SEQ ID NO: 207 - DNA, 2298 bp, Thermococcus kodakarensis KOD1
  CDS (1)..(2298): transl_table=11
atgaaaaaaggtggtctgctgctcattctcctgattctggtctcaatcgccagcggatgtatctcggagagcaacgaaaatcaaactgcaacggcttcgaccgttccaccgacttcagtgacaccctcacagtcttccactcccacaacctcgacctcgacgtacggcccttccgaaagaacggagcttaaacttccttcggttaactacactcccatctacgtcggcatagagaaaggctgtccctccggaagagtcccggtgaagttcacgtacaaccccggaaacaagaccgtaaagtctgtcagcctccgcgggagcttcaacaactggggagagtggccgatggagctgaagaacggcacgtgggagacgaccgtctgtctccgccctggaaggtatgagtataagtacttcatcaacggccagtgggtcaaggacatgtccgacgacgggacgggaaggccctacgaccccgatgcagacgcctatgcccccgatggctacgggggaaagaacgccgtgagggtagttgagggccgcgaagcgttctacgtggagttcgatccaagagacccagcctacctcagcatcgcggacaaaagaaccgtggtcaggttcgaggctaagagagacaccgtcgagtctgcggttctcgttacggatcacgggaactacacgatgaagcttcaggtctggtgggacttcggcgaaacctggcgcgccgagatgccagttgaacccgctgattattacattctcgtaacctcctccgacggcgggaagtttgccgtcctaaacacaagcgaaagcccgttcttccactttgatggcgttgaggggttcccccagctggagtgggtgagcaacgggataacctaccagatattccccgacaggttcaacaacggcaataaaagcaacgatgccctagctttggatcacgacgagctaattttgaaccaggttaatccagggcagccaatcctctccaactggagcgacccgataacgcccctccactgctgccaccagtacttcggcggcgacataaagggaataacggagaagctcgactaccttcagagcctaggtgttactataatctacatcaacccgattttcctctcgggaagcgcccacggctacgacacctacgactactaccggctcgaccccaagttcgggaccgaggatgagctgagagagttcctcgatgaggcccacaggaggggaatgagggtaatcttcgatttcgtgcccaaccactgcggcatagggaatccagccttcctcgacgtctgggagaagggcaacgaaagcccatactgggactggttcttcgtcaagaagtggcccttcaagctcggcgatgggagcgcctacgtcggctggtggggctttgggagccttccgaagctcaacactgccaaccaggaggtcagggagtacctgataggagcggccctccactggatagagttcggctttgacggcattagggtggatgtgccgaacgaagtcctcgacccggggacgttcttcccggagctgagaaaggcagttaaggagaaaaagcccgacgcgtacctcgtcggcgagatatggacgctctccccggagtgggtgaagggagaccgcttcgactccctcatgaactacgccctcgggagggacatcctcctgaactacgctaagggcctgctcagcggagaaagtgcaatgaaaatgatgggacgttactacgcttcctacggcgagaacgtagttgcgatgggcttcaacctcgttgattcgcacgacacttcgagggttctcactgacctcggtggtggcaaactgggagacacaccgtcaaacgagtcaattcagaggctcaagctcctctcaacgctcctctatgccctgcccggaactcccgtcaccttccagggggacgagaggggactgctcggagacaagggacactacgatgagcaacgctatccgatacagtgggatactgtgaacgaggacgtcctgaaccactacagggcactggcggagctcagaaaaagagttcccgcattgaggagcagcgcaatgaggttctacactgccaaaggcggcgttatggccttcttcaggggacatcatgacgaggttctcgtcgttgccaacagctggaagaagccagccctactggagcttcccgagggagagtggaaagtaatctggcctgaggatttcagcccggaactgcttcgcggcacagttgaagtgccagccatagggataatcatccttgagcggggttga

SEQ ID NO: 208 - protein, 765 aa, Thermococcus kodakarensis KOD1
MKKGGLLLILLILVSIASGCISESNENQTATASTVPPTSVTPSQSSTPTTSTSTYGPSERTELKLPSVNYTPIYVGIEKGCPSGRVPVKFTYNPGNKTVKSVSLRGSFNNWGEWPMELKNGTWETTVCLRPGRYEYKYFINGQWVKDMSDDGTGRPYDPDADAYAPDGYGGKNAVRVVEGREAFYVEFDPRDPAYLSIADKRTVVRFEAKRDTVESAVLVTDHGNYTMKLQVWWDFGETWRAEMPVEPADYYILVTSSDGGKFAVLNTSESPFFHFDGVEGFPQLEWVSNGITYQIFPDRFNNGNKSNDALALDHDELILNQVNPGQPILSNWSDPITPLHCCHQYFGGDIKGITEKLDYLQSLGVTIIYINPIFLSGSAHGYDTYDYYRLDPKFGTEDELREFLDEAHRRGMRVIFDFVPNHCGIGNPAFLDVWEKGNESPYWDWFFVKKWPFKLGDGSAYVGWWGFGSLPKLNTANQEVREYLIGAALHWIEFGFDGIRVDVPNEVLDPGTFFPELRKAVKEKKPDAYLVGEIWTLSPEWVKGDRFDSLMNYALGRDILLNYAKGLLSGESAMKMMGRYYASYGENVVAMGFNLVDSHDTSRVLTDLGGGKLGDTPSNESIQRLKLLSTLLYALPGTPVTFQGDERGLLGDKGHYDEQRYPIQWDTVNEDVLNHYRALAELRKRVPALRSSAMRFYTAKGGVMAFFRGHHDEVLVVANSWKKPALLELPEGEWKVIWPEDFSPELLRGTVEVPAIGIIILERG

SEQ ID NO: 209 - DNA, 2724 bp, Xanthomonas oryzae pv. oryzae KACC10331
  CDS (1)..(2724): transl_table=11
gtgggagctgggcctgcccgatcacgccaccgttgccgtggacgatctgtgggacgggcatcgcttcgcgtggcacggcaaataccaacacatccgtctagaggcgaggcggccgttcgcgttatggcgcatccgcgcaggagaggtcgcatgaatgcagtggcatcgttacaagccgacgcggagccatccgccgtggtcgccgaccagcgttggtacaaggacgcgatcatctaccaagtgcacgtcaagtcgttcttcgactccaacgacgatggcatcggcgattttcccggactgatttccaagctggattacatcgccgaactcggcgtggacaccatctggttgttaccgttctaccccagcccgcgccgtgacgatggctacgacattgccgaatacatggcggtgcatccggattacggcagcatcgaagattttgaacagttggtcgcgcaggcgcacgcgcgcggtatccgcatcgtcacagagctggtgatcaaccacacctcggatcagcatccctggtttcagcgcgcacgcactgcgccagccggctcgcccgggcgcgacttctacgtgtggtcggataccgatcaggagtacgaaggcacgcggatcatcttctgcgataccgaaaaatccaactggacctgggatccggtggccgggcagtacttttggcaccgcttctattcgcatcagccggatctgaacttcgataacccggccgtgctggaagctgtgctggaagtgatgcgcttctggctggatcgcggcgtggatggcctgcgtctggatgcagtgccgtatctgatcgaacgcgccggcacctccaacgaaaatctgccggaaacccatgccattttgcgcaagatccgcgccaccctggatgccgaatacccggaccgcatgctgctggccgaagccaacatgtggccggaagacacccagcaatacttcggccagaacgccgacgaatgccacatggcattccacttcccgctgatgccgcgcatgtacatggcaatcgcgcgcgaagaccgcttccccatcacggacatcatgcgccagaccccggagattcccgagagctgccagtgggcgatattcctgcgcaaccacgatgagttgaccctggaaatggtcaccgattcggaacgcgattatctgtggcagacctatgccgccgatcgccgcgcgcgtatcaatctgggtatccgccgccgcctggcgccgttgctggagcgcgaccgccgccgtatcgagttgatgacctcgttgttgctgaccatgcctggcacgccggtgctgtattacggcgacgaaatcgggatgggcgacaacatccatctgggcgaccgcgatggcgtgcgtacgccgatgcagtggtcgatcgaccgcaacggcggcttttcccgtgccgacccagcgcagctggtgctgccaccggtgatggacccgctgtacggcttccaggcggtgaatgtggaagcgcagatccgcgaccagcattcactgctgacctggacgcgccgcgtgctcagcgtgcgcaagcgctaccaggccttcggccgcgggacgctgcggttcctgtatccgggcaaccgccgcatgcttgcgtacctgcgctgttatcaggacgaaaccgtgctgtgtgtggccaatctctcgcacacgctacaagcggtagaactggatctgtccgagttcgaagggcgcgtgccggtggacatcatcggcggcggcagcttcccgccgatcgggcggctgacctacctgctcacggtgccgccgttcggcttttatgcgttcgagctggtgagcgaaggcaccttgccggattggcatgtgcccagcccggtgccgttgccggactaccgcacgctggtgctgcgcagcgatgccgacggaagtgcggcgctgctgccgcatttgcctacgttggaaggcgaaatcctgccggcatggctgtcggcacggcgctggttttcagccaaggatcaggcgctgcgcagtgtgcgcatcgcgcgtcgcacaccgctgccgggcgaccaaccgatgacgctgctggagctggaggtggagctggaggacggccgccgcgagcgctacatgttgccggtgggcatcgtgtgggagcgcgagcaacccagcacgctggctgagcagctggcgctggcgcgcgtgcgtcaaggacgcgaggtgggctacctgaccgacgcgtttgcgctcaagccgatggtacgcggcgtgatcgatgcgctgtgcagcaacgcagcgctaaagttctgcgatggcgaggaggcatcgcaacaaggccaggtacgtttcgaagccaccccggcgctggcgatgctggatatcccgcacgacccggagatccgctggttgtcggccgaacagagcaacagctcgctggtgatcgccgacaaggccgtgttcaagctgctacggcacgttgcggtgggcgcgaacccggagatcgaaatcggccgccggttgaccgagatgggctacgccaacgccgcgccgctgctgggcagcatcagccgcgtcgacgggcagggcacggtcaccaccatcgcgttgttgcagggcttcatccgcaatcaaggcgatgcgtggcgctggacgctcgaccatctggcacgtagcttcgacgaatacgtcgaccgcgcagacagacgaagcgcgcgccgaagccgtcgctggctatga

SEQ ID NO: 210 - protein, 907 aa, Xanthomonas oryzae pv. oryzae KACC10331
MGAGPARSRHRCRGRSVGRASLRVARQIPTHPSRGEAAVRVMAHPRRRGRMNAVASLQADAEPSAVVADQRWYKDAIIYQVHVKSFFDSNDDGIGDFPGLISKLDYIAELGVDTIWLLPFYPSPRRDDGYDIAEYMAVHPDYGSIEDFEQLVAQAHARGIRIVTELVINHTSDQHPWFQRARTAPAGSPGRDFYVWSDTDQEYEGTRIIFCDTEKSNWTWDPVAGQYFWHRFYSHQPDLNFDNPAVLEAVLEVMRFWLDRGVDGLRLDAVPYLIERAGTSNENLPETHAILRKIRATLDAEYPDRMLLAEANMWPEDTQQYFGQNADECHMAFHFPLMPRMYMAIAREDRFPITDIMRQTPEIPESCQWAIFLRNHDELTLEMVTDSERDYLWQTYAADRRARINLGIRRRLAPLLERDRRRIELMTSLLLTMPGTPVLYYGDEIGMGDNIHLGDRDGVRTPMQWSIDRNGGFSRADPAQLVLPPVMDPLYGFQAVNVEAQIRDQHSLLTWTRRVLSVRKRYQAFGRGTLRFLYPGNRRMLAYLRCYQDETVLCVANLSHTLQAVELDLSEFEGRVPVDIIGGGSFPPIGRLTYLLTVPPFGFYAFELVSEGTLPDWHVPSPVPLPDYRTLVLRSDADGSAALLPHLPTLEGEILPAWLSARRWFSAKDQALRSVRIARRTPLPGDQPMTLLELEVELEDGRRERYMLPVGIVWEREQPSTLAEQLALARVRQGREVGYLTDAFALKPMVRGVIDALCSNAALKFCDGEEASQQGQVRFEATPALAMLDIPHDPEIRWLSAEQSNSSLVIADKAVFKLLRHVAVGANPEIEIGRRLTEMGYANAAPLLGSISRVDGQGTVTTIALLQGFIRNQGDAWRWTLDHLARSFDEYVDRADRRSARRSRRWL

SEQ ID NO: 211 - DNA, 1260 bp, Vibrio fischeri ES114
  CDS (1)..(1260): transl_table=11
atgattacaaaagcagcgatttatcatcgatctcactctagttattcttatgcatatgataaggatacgcttcatttgcgaattcgtaccgcaaaaggagaagtagacaatgcgacgctaagaattggcgacccatacgattggacttttggtggcggtggcggcaatttaaatgctgaagacgcaagcggctggacaggtggaaccaacttacccatgataaaagagtgtgaaacagaactgtttgactactggttttgtgaagcacaacctcgcttttatcgtgcacgttacgctttccttcttgaaggcaaagacagtgaaaaattactggtaagcgaaaaactcatcacccaaataaccgatgacgccgatccaatactcagtcaattactgaatttttattgcttcccatacatgaacccaactgatgtgtttaacgcaccagaatgggttaaagaaaccatttggtatcaaattttcccagagcgttttgctaatggtgacccatctatctcaccaaaaaatgtactgccttggggatctgaagatccaaaaaccaacagtttctttggtggcgatttacaaggggttattgatcatcttgattacctgcaagatctcggtattactggtatttatttcacacctatcactcaaggtgaaacgaaccataaatacgacaccaccgattatttaaaagtagaccccgcttttggtagtgatgaaacggttcatactttaatagatgaagcacataaacgtggcatgaaagtcatgctagatgcggtatttaatcatatcggtgctaattcaattcagtggcaagatgtcattaaacatggaaaagactctcaatacatcgattggttttatgtcgagcaatttccactgattgatgagtcaaaaaaagcgtaccacagtaaagagcaattaaattatcgtgcctttgcttttgcgcaaaacatgccaaaactcaatacagaaaatccagaagtgattgaatacctaattgaagttggccgctactgggtgaaaaactttgacattgatgcatggcgtttagatgtagcaaacgaagttgatcaacgtttttggcgacgcttccgtgatgaactaaaagccatcaaacctgagttatatattttaggtgaagtgtggcacgactcaatgaactggctaggtggtgatcagtttgatggcgtaatgaattacccattagcggatgccatgttaggcttttttgcccatgacacctaa

SEQ ID NO: 212 - protein, 419 aa, Vibrio fischeri ES114
MITKAAIYHRSHSSYSYAYDKDTLHLRIRTAKGEVDNATLRIGDPYDWTFGGGGGNLNAEDASGWTGGTNLPMIKECETELFDYWFCEAQPRFYRARYAFLLEGKDSEKLLVSEKLITQITDDADPILSQLLNFYCFPYMNPTDVFNAPEWVKETIWYQIFPERFANGDPSISPKNVLPWGSEDPKTNSFFGGDLQGVIDHLDYLQDLGITGIYFTPITQGETNHKYDTTDYLKVDPAFGSDETVHTLIDEAHKRGMKVMLDAVFNHIGANSIQWQDVIKHGKDSQYIDWFYVEQFPLIDESKKAYHSKEQLNYRAFAFAQNMPKLNTENPEVIEYLIEVGRYWVKNFDIDAWRLDVANEVDQRFWRRFRDELKAIKPELYILGEVWHDSMNWLGGDQFDGVMNYPLADAMLGFFAHDT

SEQ ID NO: 213 - DNA, 1815 bp, Corynebacterium glutamicum ATCC 13032
  CDS (1)..(1815): transl_table=11
atgactgatacctctccgttgaattctcagccgagtgcagatcaccaccctgatcacgcggctcgcccagttcttgatgcccacggcttgatcgttgagcacgaatcggaagagtttccagtccccgcacccgctcccggtgaacagccctgggagaagaaaaaccgcgagtggtacaaagacgccgttttctacgaagtgctggttcgtgccttctacgatccagaaggcaacggagtcggatcgttgaaaggcctgaccgaaaaactggattacatccagtggctcggcgtggattgcatttggatcccaccgttttatgattccccactgcgcgacggcggttacgatatccgcaacttccgtgaaatcctgcccgaattcggcaccgtcgatgacttcgtggaactcgttgaccacgcccaccgccgtggcctgcgtgttatcaccgacttggtcatgaatcacacctccgaccagcacgcatggttccaagaatcccggcgcgacccaaccggcccctacggagatttctatgtgtggagcgatgatcccaccctgtacaacgaagcccgcatcatctttgtagatacagaagaatccaactggacctatgatccggtgcgtggccagtacttctggcaccgcttcttctcccaccaaccagacctcaactacgacaaccccgcagtccaagaggccatgctagatgtcttgcgtttctggctggacctgggacttgatggtttccgactagatgccgttccttatctttttgaacgcgaaggcaccaacggcgaaaacctcaaagaaacccacgatttcctcaaactgtgtcgctctgtcattgagaaggaataccccggccgaatcctgctcgcagaagccaaccaatggccccaagatgtggtcgaatacttcggtgaaaaagacaaaggcgatgaatgccacatggccttccacttccctttgatgccgcgcatcttcatgggagttcgccaaggttcacgcaccccgatcagtgagatcctggccaacaccccggagattcccaagactgcccaatggggtattttcctgcgtaatcatgatgagctcacccttgaaatggtctccgatgaggaacgcagctacatgtactcccaattcgcctccgaacctcgcatgcgcgccaacgtaggaatccgcaggcgcctttccccactgcttgaaggcgaccgcaaccagctggaactccttcacggtttgttgctgtctctacctggctcacccgtgttgtattacggtgatgaaattggcatgggcgacaatatctggctccacgaccgcgacggagtgcgcacccccatgcagtggtccaacgaccgcaacggtggtttctccaaagctgatcctgaacgcctgtaccttccagcgatccaaaatgatcaatacggctacgcccaagtaaacgtggaaagccaactcaaccgcgaaaactccctgctgcgctggctccgaaaccaaatccttatccgcaagcagtaccgcgcatttggtgccggaacctaccgtgaagtgtcctccaccaatgagtcagtgttgacatttttacgagaacacaagggccaaaccattttgtgtgtcaacaacatgagcaaatatcctcaggcagtctcgcttgatttgcgtgaatttgcaggacacacccctcgagagatgtcgggcgggcagctgttccctaccattgctgaacgggagtggattgtcactttagcccctcacggattcttctggtttgatctcaccgccgatgaaaaggacgatatggaatga

SEQ ID NO: 214 - protein, 604 aa, Corynebacterium glutamicum ATCC 13032
MTDTSPLNSQPSADHHPDHAARPVLDAHGLIVEHESEEFPVPAPAPGEQPWEKKNREWYKDAVFYEVLVRAFYDPEGNGVGSLKGLTEKLDYIQWLGVDCIWIPPFYDSPLRDGGYDIRNFREILPEFGTVDDFVELVDHAHRRGLRVITDLVMNHTSDQHAWFQESRRDPTGPYGDFYVWSDDPTLYNEARIIFVDTEESNWTYDPVRGQYFWHRFFSHQPDLNYDNPAVQEAMLDVLRFWLDLGLDGFRLDAVPYLFEREGTNGENLKETHDFLKLCRSVIEKEYPGRILLAEANQWPQDVVEYFGEKDKGDECHMAFHFPLMPRIFMGVRQGSRTPISEILANTPEIPKTAQWGIFLRNHDELTLEMVSDEERSYMYSQFASEPRMRANVGIRRRLSPLLEGDRNQLELLHGLLLSLPGSPVLYYGDEIGMGDNIWLHDRDGVRTPMQWSNDRNGGFSKADPERLYLPAIQNDQYGYAQVNVESQLNRENSLLRWLRNQILIRKQYRAFGAGTYREVSSTNESVLTFLREHKGQTILCVNNMSKYPQAVSLDLREFAGHTPREMSGGQLFPTIAEREWIVTLAPHGFFWFDLTADEKDDME

SEQ ID NO: 215 - DNA, 3327 bp, Pseudomonas syringae pv. syringae B728a
  CDS (1)..(3327)
atggccaaaaagcccggtgacgcgacatttatcaaagacccgctctggtacaaggatgcggtgatttatcaggttcacgtgaaatcgttctttgattccaataacgacggaatcggcgatttcgcgggcttgatcgaaaagctcgactacattgccgcgctgggcgtcaacaccatctggttgttgccgttttatccgtcgccacgccgggacgatggctacgacatttccgaataccgggatgtgcacagcgactacggcaccatggccgatgccaagcgtttcatcgcccaggcacacaagcgcggcctgcgagtgatcagcgagctggtcatcaatcatacttccgaccagcatccctggttccagaaagcccgcaatgccaagcccggttccaaggcgcgggacttctatgtgtggtcggacaccgatcagaagtacgacggtacgcggatcatctttctcgataccgagacgtccaactggacctgggacccggttgccggccagtacttctggcaccgtttctactcgcaccagccggatctgaatttcgacaacccgcacgtgctggatgcggttctggaagtcatgcgcttctggctggatctgggcatcgacggtttgcgtctggatgccattccgtatctcatcgagcgggacggcaccaacaacgagaacctgccggaaactcatcaggtgctcaagcgcatccgtgccgagatcgacgcgaactatccggaccgcatgctgctggccgaggccaaccaatggccggaagatacccagctgtattttggtgacagcaaaggcccggacggcgatgaatgccacatggcctttcactttccgttgatgccacgcatgtacatggcgctggcccaggaagatcgttttccgatcaccgatattttgcggcagacgccggagatcccggaaaattgccaatgggcgattttcctgcgcaaccacgatgaactgaccctggaaatggtcaccgatcgtgagcgtgattacctgtggaattactacgcggccgaccgccgtgcacggatcaacctgggcatccgtcggcgcctggcacccttggtggatcgcgatcgtcgccgggtcgagttgctgaacagcatgctgttgtcgatgcccggcacaccgacgctgtattacggcgacgagatcggcatgggcgataacatctacctgggcgaccgggacggtgtgcgcacaccgatgcaatggtccatcgaccgcaacggcggtttttcgcgcgccgacccggccagcctggtgttgccaccgatcatggacccgatgtacggcttccagtcggtcaacgtcgaaatccaggagcgtgacccgcattcgctgctgaactggaaccggcgcatgctcgccgtgcgcaaacagcagaaggcattcggacgtggcacgctgaaaatgctctcgccgtcgaaccgccgcattctggcgtatacccgcgaatacacagcacctgacggacacagtgaagtggtgctgtgtgtcgccaacgtttccagcgccgctcaggctgcagagcttgagttgtctgcctacgcaggcacggtaccggtggaaatgctcggcggcagcgcattcccgcccatcggccagttgagctacctgctgacgctgccgccgtacggcttttactggtttttactggcttcggagaatcaaatgcccagttggcacgttgaacccgcgcagagcatgccggacttcccgactctggtgctcaagaagcgtctggaagagttgctcgaagagccactgcgcagcaccatggaaaacacctcgctggcggtttacctgcccaaacggcgctggttcgcgggcaaggacaaggcgatcgagaaggtcagcattgcctacgccgtgcgcttcggcgaagaagcgaatccggtgctgctcagcgaaatagaagtcaccgcaggcgggcagaccgatcgctatcaattgccgttcggcttgctggccgaagacgacatcagcagtgcactgccgcagcaactggcgctcgcccgagtgcgtcgcaatcgcgatgtcgggctgatcacggatgcatttaccctggaaactttcatccgcgcagtgattcagggcatgcagtcggatacggtcataccctgtgccgacggcgagttgcgtttcgagcaaagttcgcagctggcacccctcggcctgaacgccgagtcggaagtgcgctacctgtctgccgagcaatcgaacagttcggtggtggtcggcagcagcctggtgctcaagctgattcgcaaagtcagcgccgggacgcaccccgagctggaaatgggcgcgttcctgacccgtgccggcttcaagaacatttcgccgctgctgggctctctggtacgcgtcggcaaggacggtcagcccaacctgctgatgatcgctcagggctatctgagcaaccagggcgatgcgtgggagtggacccagaacaatctcgagcgtgcggtacgtgacgagctggcacatggtgtttccggtcaggaacagcattacaacgcgctgctcgagctcgcggacttctcgcgcagtcttggccagcgtctgggtgagatgcaccagattctcgcgtcgcccaccgacaatgcggattttgccgtcgaagtcaccagcagccaggacagcaaggcctccggggtcagcgtcaacgctcagctcgagcgcgccttgcagctgctggaacagcgcatcggcgagctggacaaggacgatcagcaactggtcaacgatctgctcgcgcagcgcaagcagatccgccagcgcgtcgaaggcctggccaagcgctccgccggtggcctgcgcattcgtgtgcatggcgatctgcatctggggcaagtactggtggtcaagggtgatgcctacctgatcgatttcgagggtgaaccggcccgcgcacttgaagagcgccgtgccaagcacagcccgttcaaggatgtcagcggtgtcctgcggtcctttgactacgctgcggccatggctgtacgcagtgcgcagagcgtcgacacgtctcccgaggcagccggcgcgcgcaaacgtgttgccgatacctacctggcgcaggcgcgagaaacctttatcgagggttatcgctcggcgaccaccggcattgcccatgcctggaaagatgcaaaaggggaggacgctgcactcgagctgttcacccttgaaaaagctgcttatgaagtgatctacgaagccgagaaccgtccagcctggctggccgttcccttgcaaggcttgcgtgggttgctgcaaccgtctgatggagagtcaatatga

SEQ ID NO: 216 - protein, 1108 aa, Pseudomonas syringae pv. syringae B728a
MAKKPGDATFIKDPLWYKDAVIYQVHVKSFFDSNNDGIGDFAGLIEKLDYIAALGVNTIWLLPFYPSPRRDDGYDISEYRDVHSDYGTMADAKRFIAQAHKRGLRVISELVINHTSDQHPWFQKARNAKPGSKARDFYVWSDTDQKYDGTRIIFLDTETSNWTWDPVAGQYFWHRFYSHQPDLNFDNPHVLDAVLEVMRFWLDLGIDGLRLDAIPYLIERDGTNNENLPETHQVLKRIRAEIDANYPDRMLLAEANQWPEDTQLYFGDSKGPDGDECHMAFHFPLMPRMYMALAQEDRFPITDILRQTPEIPENCQWAIFLRNHDELTLEMVTDRERDYLWNYYAADRRARINLGIRRRLAPLVDRDRRRVELLNSMLLSMPGTPTLYYGDEIGMGDNIYLGDRDGVRTPMQWSIDRNGGFSRADPASLVLPPIMDPMYGFQSVNVEIQERDPHSLLNWNRRMLAVRKQQKAFGRGTLKMLSPSNRRILAYTREYTAPDGHSEVVLCVANVSSAAQAAELELSAYAGTVPVEMLGGSAFPPIGQLSYLLTLPPYGFYWFLLASENQMPSWHVEPAQSMPDFPTLVLKKRLEELLEEPLRSTMENTSLAVYLPKRRWFAGKDKAIEKVSIAYAVRFGEEANPVLLSEIEVTAGGQTDRYQLPFGLLAEDDISSALPQQLALARVRRNRDVGLITDAFTLETFIRAVIQGMQSDTVIPCADGELRFEQSSQLAPLGLNAESEVRYLSAEQSNSSVVVGSSLVLKLIRKVSAGTHPELEMGAFLTRAGFKNISPLLGSLVRVGKDGQPNLLMIAQGYLSNQGDAWEWTQNNLERAVRDELAHGVSGQEQHYNALLELADFSRSLGQRLGEMHQILASPTDNADFAVEVTSSQDSKASGVSVNAQLERALQLLEQRIGELDKDDQQLVNDLLAQRKQIRQRVEGLAKRSAGGLRIRVHGDLHLGQVLVVKGDAYLIDFEGEPARALEERRAKHSPFKDVSGVLRSFDYAAAMAVRSAQSVDTSPEAAGARKRVADTYLAQARETFIEGYRSATTGIAHAWKDAKGEDAALELFTLEKAAYEVIYEAENRPAWLAVPLQGLRGLLQPSDGESI

SEQ ID NO: 217 - DNA, 1659 bp, Lactobacillus gasseri
  CDS (1)..(1659)
atgagacattggtatgaccgagcaattatttatcaaatttatcctaagtccttccaggattctaacggtgatggtattggcgacttaaatggtattagaaaaagaataccgtatttgaaggaactaggagttaatgctgtctggctgaatccagtctttgtttcaccacaagttgataatggctatgatgtatcaaactattttgccattgaccccaaaatgggaaccatggaagatatggatgacttaatcaaagaaatgcatgaagctggaattcatgtaattatggattttgttttaaaccatacttctgatcaacatccgtggtttcaagatgcaattaaaaaccctgatagtatttatcgagactactatatttttgctggtaaaaataatcagagaccaaataattggggaagtttttttggaggtagtgtttgggagaaagatcctgctggaacagggcaattttattttcatctttttgataaaagaatgcccgatttgaactggaaaaatcctgaagtcagacatgcaatgagtgaaattgcaaaatattggctagaaaagggaattgacggcttgagattagatgcctttatccatattgctaaagcagatttaaggcaaaatttcccagttaatagtgaaaatgaagaacccgtgatagctgagccattttttgcaaacttaccacaagtacaaaaatggatgcgacctttctgtgaggaaataaagcaagattatcctgatgcactattgttaggagaagcagcaagcgcgaatgttaatttagcagttgattatacaaataaagataatcacttgatggatagtgtaattacatttagatactttacagaggatcaaagtcagattgatcctagtttttcagctcaataccagccgaaatcattagatttagtaaaatttaagcaaaatcaggctgtttggcaacaaactttaagtggtgtttctaagccaaccttgtactggaataatcatgatatggctagaatagcgactagaattgctaaaaatgatattcaagctcggagcttagccatgctcatgtatttacaaaatgggttgccgattatttattatggcgaagaactcggaatgaaaaatttggagtttgaagacgcaacacaatttgaagatgagacagttaaagaatttattgaaagcgccaaaaaagctggaaaaactagtcaagaagcattactaatggcaagtaaaacccataaattgccagctagagggccaatgccatggaataatgaaaaaaataatggctttagtgatggaaatccttggcttaaaggaaagaaagttgattatgctaatgcggctgatgaaatagcagataaccatagcatgtttaatttctacaaaaaattgatcgccctaaagaaagaagcattgtttgaagatggtggctactatttattaccaacgtcaaatgacagctatgtttatgagcgtaatttagaagatcaaaaagcattagtcgctgtttctttaagtaaagatcctattgagcttgacgtagatcctgaatttaagcaggaaaaattagtagcaggcaactatcaattgaaagatggaaaattaaaattagctccgtatgcgggagtagtattagaaaaagactaa

SEQ ID NO: 218 - protein, 552 aa, Lactobacillus gasseri
MRHWYDRAIIYQIYPKSFQDSNGDGIGDLNGIRKRIPYLKELGVNAVWLNPVFVSPQVDNGYDVSNYFAIDPKMGTMEDMDDLIKEMHEAGIHVIMDFVLNHTSDQHPWFQDAIKNPDSIYRDYYIFAGKNNQRPNNWGSFFGGSVWEKDPAGTGQFYFHLFDKRMPDLNWKNPEVRHAMSEIAKYWLEKGIDGLRLDAFIHIAKADLRQNFPVNSENEEPVIAEPFFANLPQVQKWMRPFCEEIKQDYPDALLLGEAASANVNLAVDYTNKDNHLMDSVITFRYFTEDQSQIDPSFSAQYQPKSLDLVKFKQNQAVWQQTLSGVSKPTLYWNNHDMARIATRIAKNDIQARSLAMLMYLQNGLPIIYYGEELGMKNLEFEDATQFEDETVKEFIESAKKAGKTSQEALLMASKTHKLPARGPMPWNNEKNNGFSDGNPWLKGKKVDYANAADEIADNHSMFNFYKKLIALKKEALFEDGGYYLLPTSNDSYVYERNLEDQKALVAVSLSKDPIELDVDPEFKQEKLVAGNYQLKDGKLKLAPYAGVVLEKD

SEQ ID NO: 219 - DNA, 1467 bp, Nostoc punctiforme PCC 73102
  CDS (1)..(1467)
atgcaaattcaaacaccagattgggtaaagcacgctgttttctaccaaattttcccagatcgctttgccagaagcaaacagccgcgcaaacggttattgcaagaagcccgttgggaagattgggactctatgccaaccctccagggttataaaggtggggatttatggggcatcatggaggatttagactacatccagaatttggggattaacgcgatttatttcacacccatctttcaatccgccagtaatcaccgctatcatacccacgattattatcaagttgacccgatgttagggggcaacgaggcttttaaagaattgcttgatgcagcccatcaacggaatatcaaagtcgttctggatggggtgtttaaccattccagccgtggctttttctttttccacgacgttttagaaaatggcccccattcaccttgggtaaattggttcaaaatagaaggctggcccctttcaccttataacggtgaattccctgcaaactacgtgggttgggcgggaaatcgcgccttgccagaatttaaccacgataatccagaagtacgagaatatattatggaaattgccgaatattggcttaaattcggcatcgacggttggcgattagatgtcccatttgaaataaaaactccgggtttttggcaggaattccgcgatcgcactaaagccatcaatcccgaagcatatattgtgggcgaagtgtggggagattcccgccagtggttggatggaacgcaatttgacggcgtaatgaattatttatttgctgggccgacaattgcttttgcagctggcgatcgcgtagtcttagaacaagtccaaagccgcgactatcaaccctacccacccttatttgctgccgagtacgccaccaaaatccaagaagtactgcaactttacccttgggaaattcagctaactcaactcaatttgttagcaagtcacgatacagcccgattgatgaccattgcaggcggtgatatagcgagtgtagaattatcgactttactgttactcacctttcccggtgcccccagcatttactatggtgatgaagtcggtttacctggtggcatagatcccgactcaaggcgtggctttcctttagaggctaactggaatcaagaaattttcaatactcatcgtcaattaattaccatccgccaaacatacccagccttgcgtacaggtgattaccaagtcctctatgctcaagggcaactttatctctttgcacgaactttaggcacagaagaattgataattgctataaacgctggcacaagttcggcaaccgcaaatgtagatgtggctagtttgcatactcaacccaacaagctgttatatggtactgctgaagctgagtggaatggtgaagaaggaactcagcaattgtcattaactcttcccgcacgcagtggctgcatcctggggactggggactag

SEQ ID NO: 220 - protein, 488 aa, Nostoc punctiforme PCC 73102
MQIQTPDWVKHAVFYQIFPDRFARSKQPRKRLLQEARWEDWDSMPTLQGYKGGDLWGIMEDLDYIQNLGINAIYFTPIFQSASNHRYHTHDYYQVDPMLGGNEAFKELLDAAHQRNIKVVLDGVFNHSSRGFFFFHDVLENGPHSPWVNWFKIEGWPLSPYNGEFPANYVGWAGNRALPEFNHDNPEVREYIMEIAEYWLKFGIDGWRLDVPFEIKTPGFWQEFRDRTKAINPEAYIVGEVWGDSRQWLDGTQFDGVMNYLFAGPTIAFAAGDRVVLEQVQSRDYQPYPPLFAAEYATKIQEVLQLYPWEIQLTQLNLLASHDTARLMTIAGGDIASVELSTLLLLTFPGAPSIYYGDEVGLPGGIDPDSRRGFPLEANWNQEIFNTHRQLITIRQTYPALRTGDYQVLYAQGQLYLFARTLGTEELIIAINAGTSSATANVDVASLHTQPNKLLYGTAEAEWNGEEGTQQLSLTLPARSGCILGTGD

SEQ ID NO: 221 - DNA, 1674 bp, Nostoc punctiforme PCC 73102
  CDS (1)..(1674)
atggcaaatttaactgactttaaattgtttgctcctcgcaacaaaggagcagctttaattgggtctttttcggattggaaagaaattccaatgtctaaaagtgaagatggttattttcgcactaaaatcaaactggaagacggcgtttatcaatataaatttcgcattcaaactaaaagtccaaattttgcacctgatgaatggatcgatgtcattgatcctaaagcaacagaagttaatgaaacagaaaaatatggcatagttcgtattcaagatgggcaacgcattgttgatagttacttttggcaacacgatgaaatgccgttgcctgataaccgggaattagtcatatatgaaatgcacgttgctgattttactggtgatgaagttgattctaacgagcgaggcaaatatctagggataattgctaagttagattatctttgcgaactgggaattaatgcaattgaattaatgccagttaatgagtaccctggtgattatagctggggctataaagttcgccacttctttgctacagaatctagttacggttcaacagaagatttaaagcgattgattgacgagtgtcatggtagaggtattcgcgtctttatggatggaatttataaccacacagatgaagaatgcccattaatactaattgaccgcaattactggtactacgaacataaacattatcctgaagacccagctaattactgggggccagagtttaactatgatttttacgacaaaaacttaaatattcaacctgcatgggaatacatcggcgatgtggtaaggttttggattcaggaatatcacattgatggaattcgctttgatgcagtacggcaattggctaactttgaatttctcaactggctgactaagcaagcgaaaaaccatgctgcacccaagcagttttacaacattgctgaacacattcccgatacaaacactgtagtcaagccagatgggccattagatgcttgttggcatgagagctttcgctactttttagttccatatatttgtggaaaatcatttgaattagaacaactcaagcaaattttagaccccaaacagcagggttatgcgatcgctaccaatgtgataaattatttggcaacccacgatcgcgaacgtctattacgagaattaggcaattgcggcatctttgacgcagccgcatttgaacgagccaagttagcagctgttttgttaatgacagcgatgggtataccgatgctgtggatggcagaagagtttggcgaataccagcaaaaaagtgaagatgtgactaagccgcagaaaattacttggtctttgttgttagacgaccaaaattatgatttatttgagtattatcaaaagctgattactctacgccagcaaactccagctttgcaaagtgacaatattaagtttttctacgaaaatgcagatgataaagtgttggcttacagccgttgggatgagcaaaattctcatgtcgtcgttgtggtaaatttttccgatcggagtctaaatcaatataaaatttccgacttcccaactactgaagattggcgagattgggttggtaatcgggaagtgaaatctggagaagatggtttagtcactgacttgccaagctatacagctaaaatatttgttttgcaaacatga

SEQ ID NO: 222 - protein, 557 aa, Nostoc punctiforme PCC 73102
MANLTDFKLFAPRNKGAALIGSFSDWKEIPMSKSEDGYFRTKIKLEDGVYQYKFRIQTKSPNFAPDEWIDVIDPKATEVNETEKYGIVRIQDGQRIVDSYFWQHDEMPLPDNRELVIYEMHVADFTGDEVDSNERGKYLGIIAKLDYLCELGINAIELMPVNEYPGDYSWGYKVRHFFATESSYGSTEDLKRLIDECHGRGIRVFMDGIYNHTDEECPLILIDRNYWYYEHKHYPEDPANYWGPEFNYDFYDKNLNIQPAWEYIGDVVRFWIQEYHIDGIRFDAVRQLANFEFLNWLTKQAKNHAAPKQFYNIAEHIPDTNTVVKPDGPLDACWHESFRYFLVPYICGKSFELEQLKQILDPKQQGYAIATNVINYLATHDRERLLRELGNCGIFDAAAFERAKLAAVLLMTAMGIPMLWMAEEFGEYQQKSEDVTKPQKITWSLLLDDQNYDLFEYYQKLITLRQQTPALQSDNIKFFYENADDKVLAYSRWDEQNSHVVVVVNFSDRSLNQYKISDFPTTEDWRDWVGNREVKSGEDGLVTDLPSYTAKIFVLQT

SEQ ID NO: 223 - DNA, 1266 bp, Bifidobacterium longum DJO10A
  CDS (1)..(1266)
atgcccgattgggtgaagtacggggtgttctggcacgtgtatccgctgggcttctgcggtgccgatatcaggcccgccggcccgcgccagttccatggccgcggccttgacgcgataattccctggctggagtacgtgcgcgatctaggcgcgtccggcctgctgctgggtccggtgttcgagtcggcgacgcatggatacgacacgctcgaccatatgcatatcgatgtgcgattgggcggggatgccgcgttcgatcagcttgtcgcggcctgccgggacatgggattgcaggtgatgctggatggcgtgttcaatcatgtgagccgcaatcatccggccgttcaggcggcgcttgacgagaccgccggacgcttgaatccggccgacaacccgtggcatggtctggtccgcgcgcatgtcggtgataatggcgaacccgctttggatgtgttcgaggggcacggggatctggtggcgctggaccattcggctgacgagaccgttgactatgtggtccatgtgatgagccattggctggatcgcggagtcgccggctggcgcctcgacgccgcgtatgccgtgccgagcccgttctgggcgcgcgtgttgccgcaggtcaaagccgcacacccgtattcgtggattttcggcgaggtgatccatggcgattacccgcgcatcatcgaggaatccacgatggattcgatcacgcaatacgagctatggaagtcgatccagcatgcgctggagacggagaacttcttcgagctggattggaacttgaagcggcacaacgcgttcctggattccttcgtgccgcagacgttcatcggcaaccatgacgtgacgcgtatcgcatcgcagattggcccggccaaggcggcgttggcattggcggtgctcatgacggtcggcggcgtgccaagcatctattacggcgacgaacagggctatgtgggcgtcaagcaggagcgtttcggcggcgatgacgacgtacgtccgaagttccccggctcccctgccgaactgtccacgctgggagagccgacataccggctgcatcaggcgctgatcgcgctgcgccgtcgcaacccatggctgctggatgcgcgtaccgaggccgtgaagctggaaaacaagcacttcgtctatcgttcgacgagcgccgacgcccagcattccctgaccgtggacctcaacatcgagcaatcccccactttcaccatccgcaacgccgatggcagtacagcgtatcaatggtga

SEQ ID NO: 224 - protein, 421 aa, Bifidobacterium longum DJO10A
MPDWVKYGVFWHVYPLGFCGADIRPAGPRQFHGRGLDAIIPWLEYVRDLGASGLLLGPVFESATHGYDTLDHMHIDVRLGGDAAFDQLVAACRDMGLQVMLDGVFNHVSRNHPAVQAALDETAGRLNPADNPWHGLVRAHVGDNGEPALDVFEGHGDLVALDHSADETVDYVVHVMSHWLDRGVAGWRLDAAYAVPSPFWARVLPQVKAAHPYSWIFGEVIHGDYPRIIEESTMDSITQYELWKSIQHALETENFFELDWNLKRHNAFLDSFVPQTFIGNHDVTRIASQIGPAKAALALAVLMTVGGVPSIYYGDEQGYVGVKQERFGGDDDVRPKFPGSPAELSTLGEPTYRLHQALIALRRRNPWLLDARTEAVKLENKHFVYRSTSADAQHSLTVDLNIEQSPTFTIRNADGSTAYQW

SEQ ID NO: 225 - DNA, 3333 bp, Desulfovibrio desulfuricans G20
  CDS (1)..(3333)
atgagcattatgattgagccggcgggccttgatccgcagtggtacagggatgccatcatatacgaattgcacatcaaatcgtttcatgattccgacggcgacggcatgggcgatatggcggggctgattgaaaaactggactatctgcaggatctcggggtcacggcgctgtggctgctgcccttttacccctctccgctgcgtgatgacggctacgatattgccgactacatgagcatcaaccccgactacggcagcatggctgacttccgcaagctgctgcgcgaggctcattcccgcgggttgcgcgtcattacagaactggtgctcaaccacacctcagaccagcatgcctggttccggcgggcgcggcgggcccctgccggttcggaagagcgcgatttttacgtgtggagcgatacctcggacaggtacaaggacgcccgcatcattttcaaagacttcgagccttcaaactggtcatgggaccctgtggcacgggcatattactggcatcgtttctatcatcaccagcctgatctcaattatgaaaatccggccgtgcacaaggccatgttccgggtcatcgacttctggctggacatgggggtggacggagtgcggctggatgctgtgccctatctgtacgaagaagaaggcacaaactgcgaaaatctgccgcggacccatgattttcttaaagcgttgcgcagccacatagacagcagatttcagggccgcatgctgctggccgaggcgaaccagtggccggaagacgcggcccgttatttcggcgacggtgattcgtgtcatatggcatttcattttccgcttatgccgcgcatgtttatggccattgaaatggaagaccgtcatccggtcattgatataatggagcagactccggaactgccggacggttgccagtgggctatttttctgcgtaaccatgacgaactgacgctggagatggtgacggacgaagagcgcgactacatgtaccgcatgtatgcccgtgatccgcgtgcgcggataaatctcggcatccgccgccgccttgccccgctgctgggcaacgaccgccgcagagtggagctgcttaacgtgctgcttttcaccatgccggggacaccggtgctttattatggtgacgagataggcatgggggacaactactatctgggcgaccgcgacggtgtgcgtacccccatgcaatggagtgcggacagaaacgccggtttttcacgctccaatccgcagcgtctttttctgccggtggtcatcgatccggaataccactacgaggctgtgaatgtggaaacgcagcagtccaacaaaagttcgctgctgtggtggatgaagcgcatcatcgccatgcgcagaagatatacggctttcagccggggcggcatttcgtttctccggccggaaaactcccgtgtgcttgcctacatgcgcagctctggtgaagaacatgtgctggtggtgactaacctgtcgcggcacgcacaggcagcttcgctggatttaagcggctgggaaggctaccggccggtggaagtcttcagcaacacgcgctttcccgctgtcaggcaaccggcgtatacaattacgctcaatccttacggctactatattttccacatgcgcagagaggaggcggcggaagcgcttaccggattattttcgccgcctatgctcatgccggtgtccggagcgcgttttcttgatgtggaagtacgcgaggcgctgcagcgcagagttctgcccggctatctgacacgtcgcggattgctgggaacaagcgccgtgcagctgcgcgaggctgtcattctggaagcggtgcccgtgggcggcaagggtgcccccagctggttgctgattgtggaagcacggtatcaggagcgccagccggaatggttcggcatgcttgtatcgttgctggctggtgaacctgcccggcagacggtgcgtgaagcgcctgtgcatctcatgtgcacttttggtgaagacgcgccggaagccgtacttgtggaatcctttgatgccagctgccgttgcggcgcgttgctgcagcttgtctcgcgcacgcagacagtgaagggcaggcacggcgagctggcagtggcccccgccggcggtacccgcggcagagtgcgggcggcctgcgccgaagatgctcctgccctgtggaagccccatatccacgccaccagcgttgtctgcggtgaaagtgtgcttttcaaggtgtaccgccgcatggacgaaggtgtgaatccggatgtggaactgctgcgctttctgaccgaagaggcggggtatcctcatgtgcccgcgtatatgggcgttgtggagtacagacggtcgcgcacatcgtccatggctgtggccatgctgcatgaatatgtgcaggcgcagggcgacgcacaggaaatgtgccgcgatatggtacgcaggttctttgacagggtgctggccgcacggggcgagatggatatccgtccccggctgtatgcccgttctcccgtggaagccgcaggaagacctttgccgcaggaataccgtgaacttatgggcgatatggattttgccggcatgcagctgctgggcaggcgtgtgggcgaactgcaccgcgcgctggcgttcagctctgaagactctgcttttgctccggagccgttttccaccctgtatcaacggtctgtgtatcagggtatgcaaagccgggtaaagcaggtcctgacccgtctggaacgttcgcttgctttgctgccggaatcggccagagacgatgctgcgcgggtgctggaactgcgcgaagaagctttgcggcgcatgcgcggttttcttacgcgcaaacttgattgtctgaaaatcagggtgcatggcaacctgcatctgggcaatgtgctgcgcagcggcagagagtatgtgatcgtgaactttgagggcaggccggacaagtctctttccgaacggaggctgaagcgttcacccctgcgcgatgtggcagatctggtacggtcggtgcattacaccgtgctcacggtgctgatgcatgaatcggttctccggcctgaagaccgcgcgtttcttgaaccctgggccgatttgtggcgcatagaagcctcaggagctttcatgaccacatatcttgaagccgtgggcggcagcaggctggtgcccgaaaatgaacaaggcgttcaggtgctgctggaagcgtttttgctggaaaaagcgtttatggagcttgatgcagaactgaaagcgccttccggcatggtgggactgccgctggctgccattatcaccctgctgggagcagagggctga

SEQ ID NO: 226 - protein, 1110 aa, Desulfovibrio desulfuricans G20
MSIMIEPAGLDPQWYRDAIIYELHIKSFHDSDGDGMGDMAGLIEKLDYLQDLGVTALWLLPFYPSPLRDDGYDIADYMSINPDYGSMADFRKLLREAHSRGLRVITELVLNHTSDQHAWFRRARRAPAGSEERDFYVWSDTSDRYKDARIIFKDFEPSNWSWDPVARAYYWHRFYHHQPDLNYENPAVHKAMFRVIDFWLDMGVDGVRLDAVPYLYEEEGTNCENLPRTHDFLKALRSHIDSRFQGRMLLAEANQWPEDAARYFGDGDSCHMAFHFPLMPRMFMAIEMEDRHPVIDIMEQTPELPDGCQWAIFLRNHDELTLEMVTDEERDYMYRMYARDPRARINLGIRRRLAPLLGNDRRRVELLNVLLFTMPGTPVLYYGDEIGMGDNYYLGDRDGVRTPMQWSADRNAGFSRSNPQRLFLPVVIDPEYHYEAVNVETQQSNKSSLLWWMKRIIAMRRRYTAFSRGGISFLRPENSRVLAYMRSSGEEHVLVVTNLSRHAQAASLDLSGWEGYRPVEVFSNTRFPAVRQPAYTITLNPYGYYIFHMRREEAAEALTGLFSPPMLMPVSGARFLDVEVREALQRRVLPGYLTRRGLLGTSAVQLREAVILEAVPVGGKGAPSWLLIVEARYQERQPEWFGMLVSLLAGEPARQTVREAPVHLMCTFGEDAPEAVLVESFDASCRCGALLQLVSRTQTVKGRHGELAVAPAGGTRGRVRAACAEDAPALWKPHIHATSVVCGESVLFKVYRRMDEGVNPDVELLRFLTEEAGYPHVPAYMGVVEYRRSRTSSMAVAMLHEYVQAQGDAQEMCRDMVRRFFDRVLAARGEMDIRPRLYARSPVEAAGRPLPQEYRELMGDMDFAGMQLLGRRVGELHRALAFSSEDSAFAPEPFSTLYQRSVYQGMQSRVKQVLTRLERSLALLPESARDDAARVLELREEALRRMRGFLTRKLDCLKIRVHGNLHLGNVLRSGREYVIVNFEGRPDKSLSERRLKRSPLRDVADLVRSVHYTVLTVLMHESVLRPEDRAFLEPWADLWRIEASGAFMTTYLEAVGGSRLVPENEQGVQVLLEAFLLEKAFMELDAELKAPSGMVGLPLAAIITLLGAEG

SEQ ID NO: 227 - DNA, 1467 bp, Anabaena variabilis ATCC 29413
  CDS (1)..(1467)
atgcaaattcaaacaccagactgggtgaaaaacgctgtattctaccaaatctttccagaccgttttgctataagtaaacagtcccggaagcggctgttgcgtgatgtgcgttgggaagactgggacgcaatgccaacactgcaaggatacaaaggcggtgatttatggggcattatggagcagttggactatattcaagatttgggcatcgatgccatctactttacgcccatctttcagtctgccagcaatcaccgctatcatacccacgactattatcaagtagacccgatgttgggtgggaatgccgcttttaaggagttactagacgcggcccacgaacgcaatattaaagttgtcctcgatggcgtatttaatcattccagtcgaggatttttctttttccatgacgttttggaaaatggcccccattctccttgggtaaattggttcaaaatagaaggctggcctcttgcaccatatacaggtgagttaccggcaaattacgtaggttgggctgataatcgtgccttgcccgtatttaatcacgataacccagacgtacgggaatatattatggaaattgccgaatattggcttaaattcggcatcgacggctggcgattggatgtaccatttgaaattaaaactcctggcttttggcaagaattccgcgatcgcgttaaagccattaaccccgaagcttatattgtgggggaagtgtggggagattcccgtgagtggctagatgggacgcaattcgacggcgtgatgaattacttatttgccgggccgaccattgcttttaccgcaggcgatcgcgtagtcttagaacaagtccaaagccgcgactatcaaccgtatccgcccctattcgccgccgaatacgccaccaaaattcaggaagtactgcaactttatccttgggaaattcaacttacccaactcaacttattagccagtcacgatacagccagactaatgaccattgctggcggtgatcaagccagtatagaattagctaccctattactacttacctttcctggtgcgccgagtatctactacggtgatgaagtgggtttaccgggaggtatagaccccgattctcgccggggttttcccttagaagccaactgggatagagaaatttaccagactcaccgtcaattaatagccttacgccacgcttacccagccttacgcacaggtgagtatcaagttatttgggcgcaaggtgcattgtatgtatttgcccgtactttaggtaaggaagaactgattattgctgtaaatgtaggtacagcaccagcccaggctaatgtagatgttgctagtttgcagactcagccagataaaatcctgtatggcgaagcagaatttagctggcacaatacagaagaaacaaaacaactttccttaaatctccccccacgtagtggctgcattttgggtttaggggattag

SEQ ID NO: 228 - protein, 488 aa, Anabaena variabilis ATCC 29413
MQIQTPDWVKNAVFYQIFPDRFAISKQSRKRLLRDVRWEDWDAMPTLQGYKGGDLWGIMEQLDYIQDLGIDAIYFTPIFQSASNHRYHTHDYYQVDPMLGGNAAFKELLDAAHERNIKVVLDGVFNHSSRGFFFFHDVLENGPHSPWVNWFKIEGWPLAPYTGELPANYVGWADNRALPVFNHDNPDVREYIMEIAEYWLKFGIDGWRLDVPFEIKTPGFWQEFRDRVKAINPEAYIVGEVWGDSREWLDGTQFDGVMNYLFAGPTIAFTAGDRVVLEQVQSRDYQPYPPLFAAEYATKIQEVLQLYPWEIQLTQLNLLASHDTARLMTIAGGDQASIELATLLLLTFPGAPSIYYGDEVGLPGGIDPDSRRGFPLEANWDREIYQTHRQLIALRHAYPALRTGEYQVIWAQGALYVFARTLGKEELIIAVNVGTAPAQANVDVASLQTQPDKILYGEAEFSWHNTEETKQLSLNLPPRSGCILGLGD

SEQ ID NO: 229 - DNA, 3366 bp, Ralstonia eutropha JMP134
  CDS (1)..(3366)
atgaaacgcctgaccgaacccgccaacgccctgctgctcaacgcggatccgctctggtacaaggacgcggtggtctaccagcttcatatcaagtccttctacgacgcgaacggcgacggcgtgggggacttcgcgggcctgctggccaagctggactacctggtcgacctcggcattgacacgatctggctgctgccgttctacccgtctccgcggcgcgatgacggctacgacattgcggattaccgcaacgtgcatcccgactacggcacgctcgccgaagcccgccgcttcgtcggggctgcgcatgcgcgcggcatccgcgtcatcacggaactggtcatcaaccacacctcggaccagcatccgtggttccagcgagcgcgcaaggccaagccgggctccgccgcgcgccgctactacgtgtgggccgacaatgaccaggcctatgccggcacccgcatcatcttctgcgacaccgagaaatcgaactggagctgggaccctgtcgccggcgcgtacttctggcaccgcttctattcgcaccagcccgacctgaacttcgacaacccgcaggtcatgaacgaggtgctgtcggtcatgcggttctggctggacatcggcgtggacgggctgcggctggacgctgtgccttacctcgtcgaacgcgaaggcaccacgaacgagaacctgcccgagactcataccgcgatccggcatatccgctcgcatctcgattcccactaccagggacgcgtgctgctcgccgaggccaacatgtggccagaagatgcgcagcagtacttcgggcgcagcagcaccggcgacaagggcgacgaatgccatatggccttccacttcccgctcatgccgcgcatgtacatggccatcgcacgcgaagaccgcttcccgatcaccgacatcatgcgccagacgccggagctgccgaccgactgccagtgggcgatcttcctgcgcaaccatgacgaactgacgctcgagatggtcaccagcagtgagcgcgactacctgtgggaagtctatgcgtcggaccggcgcgcacgcatcaaccttggcatccggcgcaggctggcgccgctgatggaacgcgaccggcgtcgcatcgaactgatgaacagcctgctgttttccatgccgggcacgccagtgatctactacggcgacgagatcggcatgggcgacaacatccaccttggcgaccgggacggcgtgcgcacgccgatgcagtggtcgcccgaccgcaatggcggcttctcgcacgcggaccccgagcgcctggtgctgccgccgctgcagggccccctgtacggctacgaggccgtcaacgtcgaagcgcaggcgcgcgatccgcattcgctgctcaactggatgcgccgcatgctggcgctgcggcgcaagcaccgcgcgttcgggcggggcacgctgcgcttcctgtttccgggaaaccgcaagatcctggcctatctgcgcgagtacgaaggcgagcacatcctgtgcgtcgcgaacctgtcgcgggcgccgcaggccgtggaactcgatctttcggccttcaacgggcgcgtgccggtggagatgatgggcgccacgccgttccccgcgatcggcacgctgacctacctgctgacgctgcccccctatggcttctactggttcgtgctcagcgaggatgcccatccgcctgcctggcacgtctcggccccggaacagatgcccgaccagatcacgctcgtgctgcagaacaaggggcggcccgaactgacggaggccgcgcgccgcatgctcaacgatgaagtgctgccgccctatatccgccgccggcgctggttcggcgcgaaggacgacagcatccagcgcgccacactcgcctacatggccccgttcaccaaaggcaccacaggcgaggaaatctatctcggcgaagtggaagtcaggctttccggcggccgtaccgagcgctaccagcttccgcttggggtgctgtgggaccgcgagagtgccgatagcgtgtcccagctggcgcacgggctgtcgatggcgcgcgtacgccagggcagccgggtaggactggccacggatggcttcgtgctggaaccgttcgcgcgcgaggtcatccgcgcgctgcgtgcagacgccgaactgcaggggccacaggagaccatccgcttccgctccgagcccgggctgtccgcggtacagcccgagcaggaggaaatccagtggatgtcagcggagcagtccaacagctcgctggcgtacaacaacacggccgtgctcaagctggtgcggcgcctctccggcggcacacatccggaagtggagatgacgcgctacctgacggcgcagggttatccgcattcccctcccctgctgggcgaggtggtccggaccggcgcggacggcgtgccccatacgctgatgatggtgcagggctacatcctgaaccagggcaacggctgggactggacgctcgactacctcagtcgcgtgatcgatgacgcgctgcccgcgcaggaaagcgcggacgagttcgccgaagcgatgaacggctacgccaccatggccggcacgctcggccgacggctggccgagttgcatgcagtgctcgcgcgtcccaccgacgatcccgcctttgccccgcggccggctaccgatgctgaaacgcggcagtgggccgagcaggccatggcggctatcacgcatgcactggcattgctggaaaagcgcgcgcagaacgacccgaaatccgcaagcaagcgcttcatggccgacgtcgatacgctgctgaaggcgcgcgacgccctgcccgcactggtcaaccggcttgccgcagccgcgcccggcagcctgcagacacgattccacggcgacttccacctgggccaggtgctgattgcgcagaacgacacctacctggtggatttcgaaggcgagccgggtcagccactcgactggcgccggcgcaaaacctcgccactgcgcgatgttgcggggctgctgcgttcgatcgactacgccgctgcgaccgttggcacggaccggcaggaacgcacccacgcggagttgccgcccgcgctggcggagcgccgcggcggcttgctcgaacgcttccgcgaaaccgccagcgacgccttcctgggctgctaccggcgtcatatggaggcctccggcacgccgtgggccgacaacgcgcagtttcagccgctactcgatctgttcctgctggaacgcgctgcgtacgaagtcgaatatgaagcggccaatcgcgtcgcctggatcgaccttccggccagcgggctcgcgcgcatggtgcgcaagctcatggccggaaacctggaggcgcaatga

SEQ ID NO: 230 - protein, 1121 aa, Ralstonia eutropha JMP134
MKRLTEPANALLLNADPLWYKDAVVYQLHIKSFYDANGDGVGDFAGLLAKLDYLVDLGIDTIWLLPFYPSPRRDDGYDIADYRNVHPDYGTLAEARRFVGAAHARGIRVITELVINHTSDQHPWFQRARKAKPGSAARRYYVWADNDQAYAGTRIIFCDTEKSNWSWDPVAGAYFWHRFYSHQPDLNFDNPQVMNEVLSVMRFWLDIGVDGLRLDAVPYLVEREGTTNENLPETHTAIRHIRSHLDSHYQGRVLLAEANMWPEDAQQYFGRSSTGDKGDECHMAFHFPLMPRMYMAIAREDRFPITDIMRQTPELPTDCQWAIFLRNHDELTLEMVTSSERDYLWEVYASDRRARINLGIRRRLAPLMERDRRRIELMNSLLFSMPGTPVIYYGDEIGMGDNIHLGDRDGVRTPMQWSPDRNGGFSHADPERLVLPPLQGPLYGYEAVNVEAQARDPHSLLNWMRRMLALRRKHRAFGRGTLRFLFPGNRKILAYLREYEGEHILCVANLSRAPQAVELDLSAFNGRVPVEMMGATPFPAIGTLTYLLTLPPYGFYWFVLSEDAHPPAWHVSAPEQMPDQITLVLQNKGRPELTEAARRMLNDEVLPPYIRRRRWFGAKDDSIQRATLAYMAPFTKGTTGEEIYLGEVEVRLSGGRTERYQLPLGVLWDRESADSVSQLAHGLSMARVRQGSRVGLATDGFVLEPFAREVIRALRADAELQGPQETIRFRSEPGLSAVQPEQEEIQWMSAEQSNSSLAYNNTAVLKLVRRLSGGTHPEVEMTRYLTAQGYPHSPPLLGEVVRTGADGVPHTLMMVQGYILNQGNGWDWTLDYLSRVIDDALPAQESADEFAEAMNGYATMAGTLGRRLAELHAVLARPTDDPAFAPRPATDAETRQWAEQAMAAITHALALLEKRAQNDPKSASKRFMADVDTLLKARDALPALVNRLAAAAPGSLQTRFHGDFHLGQVLIAQNDTYLVDFEGEPGQPLDWRRRKTSPLRDVAGLLRSIDYAAATVGTDRQERTHAELPPALAERRGGLLERFRETASDAFLGCYRRHMEASGTPWADNAQFQPLLDLFLLERAAYEVEYEAANRVAWIDLPASGLARMVRKLMAGNLEAQ

SEQ ID NO: 231 - DNA, 2586 bp, Rhodobacter sphaeroides 2.4.1
  CDS (1)..(2586)
atgaatcagaatgtctctccctccaccgttgccgtccgccgcacggacggcatcgatcgcagccaaaccgactggtacaaggacgcgatcatctatcagctgcacatcaaggcgtttcaggacgccaatggcgacgggatcggtgacttcgcgggcctgatgcagcggctggattatgtgcaggcgctgggcgtgaccgcgatctggctgctgcctttctatccctcgccgctccgcgacgacggctacgacatctcggactatcgctcgatcaacccgtcctacggcgcgatgcgcgacttcaagctgttcgtgcaggaagcgcacaagcgcgggctgcgcgtcatcaccgagctggtcatcaaccacacctccgaccagcatccctggttccagcgggcccggcgggcgaagaagggatcggccgcgcgcgactggtacgtctggagcgataccgaccagaaattccccgaaacgcggatcatcttcctcgatacggaaaagtcgaactggacctgggatccggtggcaggcgcctattactggcaccgcttctattcgcaccagcccgacctgaacttcgacaatccccgtgtgctcgaggaagtgctcaagatcatgcgcatgtggctcgagatgggcgtcgacgggctccggctcgacgcgatcccctatctggtcgagcgcgagggcaccaacaacgagaacctccccgagacgcacgatgttctcaagaagatccgggccaacctcgaccagcatttccccgacaggatgctgctcgccgaggcgaaccagtggccggaggacacgcgcccctatttcggcgagggcgacgaatgccacatgggcttccatttcccgctgatgccgcggatgtacatggcgctggcgcaggccgaccggcatccgatcaccgacatcatccgccagacgcccgagatcccggaaggctgccaatggggcatcttcctccggaaccacgacgagctgacgctcgagatggtgacggccgaagagcgcgactacatgtggcgcttctacgccgaagattcgcgggcgcggatcaatctcggcatccggcgcaggctggcgccgctgatgaagaacgaccggcgcaagatcgagcttctgaaccagatgctgatgtcgatgcccggcacgcccatcgtttattacggcgacgagatcggcatgggcgacaactactatctcggcgaccgggatggcgtgcggacgcccatgcaatggtcggccgaccgcaacggcggcttctcgcgctgcaatccgcagcagctctacctgccgacgatcctcgatccggtctacggccatcaggcgatcaacgtcgaggcgcaggcggcggacccgtcgtcgctcctgaactggacgcgccgcctgatcgcggtgcgcaagcagcatccggccttcgggcgcggctcgatgagcctgctctatccgcgcaaccgcaaggtgctggcctatgtccgcagccacgagggcacggacatcctctgcgtggcgaacctctcggacacggcgcaggcggtcgagctggatctcgggcggttccgcggcgcggtgccggtcgagctcacgggccggtcggagtttccgccggtgggcgatctgccctacatgctgacgctgccgccctacggcttctactggttcatcctctccgaccagcaggcgctgccgagctggcaccagccgatgcccgagacgctgccggatttcatcacgctcacgacgcgcgacgggcgggccgagacggcgctcaccgggcgcgagacgcgccagctcgaggccgacgtgctgccgaactggctgccgctgcaacgctggttcggggccaaggaggagaagatcagcgcggtgaaactggccgttctgggctcgctgtcggccgatcatgccctcgtccggctcgaggccgatgtgggcggcgaggtgcagcagtatttcctgcccgcctccgcactctggggcgaggagcagctccgggccggggcgcccaagctgagcttcaccctggccaaggtccggcgcgggccgcaggtgggcgcgctcatcgacggggcctatgacgagcagatggcgcaggcgatgctcgaggcgctgcgcgacggtcgcagactgtctggtgccgggggcgaggtggtgttcgagccgggctcgggactggccgagatcgccgacccgggcgagccgcgctatctcggggccgagcagtcgaacatttccatcgccttcggcgaccgcctgatcctgaagctctaccgacgcctgcgggccggcgagcagccggacgtcgaggtggcgcgcttcctgacggaagtggcgggctacacccatacgccccgctatctcggcgtcgtgagcctgcgcccggcggagggcgaggcgaccgtcctcgccgcgggcttcgccttcgtggccaaatggggcaacgctggcgcggctcttcgacgcgctagtcggaactggcgaatccgggatgagacggccagcgccgaatggaaaggaggtaacatccggaacaaacgggcacttatgaagagaggaagtatagtgcacccatag

SEQ ID NO: 232 - protein, 861 aa, Rhodobacter sphaeroides 2.4.1
MNQNVSPSTVAVRRTDGIDRSQTDWYKDAIIYQLHIKAFQDANGDGIGDFAGLMQRLDYVQALGVTAIWLLPFYPSPLRDDGYDISDYRSINPSYGAMRDFKLFVQEAHKRGLRVITELVINHTSDQHPWFQRARRAKKGSAARDWYVWSDTDQKFPETRIIFLDTEKSNWTWDPVAGAYYWHRFYSHQPDLNFDNPRVLEEVLKIMRMWLEMGVDGLRLDAIPYLVEREGTNNENLPETHDVLKKIRANLDQHFPDRMLLAEANQWPEDTRPYFGEGDECHMGFHFPLMPRMYMALAQADRHPITDIIRQTPEIPEGCQWGIFLRNHDELTLEMVTAEERDYMWRFYAEDSRARINLGIRRRLAPLMKNDRRKIELLNQMLMSMPGTPIVYYGDEIGMGDNYYLGDRDGVRTPMQWSADRNGGFSRCNPQQLYLPTILDPVYGHQAINVEAQAADPSSLLNWTRRLIAVRKQHPAFGRGSMSLLYPRNRKVLAYVRSHEGTDILCVANLSDTAQAVELDLGRFRGAVPVELTGRSEFPPVGDLPYMLTLPPYGFYWFILSDQQALPSWHQPMPETLPDFITLTTRDGRAETALTGRETRQLEADVLPNWLPLQRWFGAKEEKISAVKLAVLGSLSADHALVRLEADVGGEVQQYFLPASALWGEEQLRAGAPKLSFTLAKVRRGPQVGALIDGAYDEQMAQAMLEALRDGRRLSGAGGEVVFEPGSGLAEIADPGEPRYLGAEQSNISIAFGDRLILKLYRRLRAGEQPDVEVARFLTEVAGYTHTPRYLGVVSLRPAEGEATVLAAGFAFVAKWGNAGAALRRASRNWRIRDETASAEWKGGNIRNKRALMKRGSIVHP

SEQ ID NO: 233 - DNA, 3417 bp, Burkholderia cepacia R18194
  CDS (1)..(3417)
atgatgaaacgcgaagattccctcgacgacgtacgccgcgcgcaattcccgtcgctcgcgccgggcggcacaccacgccggcgccgtgcacgccgccgcgcgccggcgctctgcgcggacgatccgctgtggtacaaggacgcgatcatctaccaggtgcacgtgaagtcgttctacgactcgaacaacgacggcatcggcgatttccccggcctgatcgcgaaactcgactacatcgccgaactcggcgtcgacacgatctggctgctgccgttctacccgtcaccgcgccgcgacgacggctacgacatcgccgattaccgcgacgtgcatcccgactacggcacgctggccgacgtgcggcgcttcatccgcgaagcgcatgcgcgcggcatccgcgtgatcaccgagctggtgatcaaccacacgtcggaccagcatccgtggttccagcgcgcgcgccgcgcgaaaccgggttcgacgcaccgcgactattacgtgtggtccgacaccgacacgaaatacgcgggcacgcggatcatcttcctcgatacggaaacgtcgaactgggcgcacgacccggtcgccggccagtactactggcaccgcttctattcgcaccagccggacctgaacttcgacaacccggccgtcgtgcgcgaggtgatgcaggtgatgcgcttctggctcgatctcggcatcgacgggctgcggctcgacgcggtgccgtatctcgtcgcgcgcgagggcaccaacaacgagaacctgcccgagacgcacgcgatcctgaagcggatccgcgcgacgatcgacgccgagtacccgaaccggatgctgctcgcggaggcgaaccagtggccggaagacgtgcaggaatatttcggcgacgaggacgaatgccacatggcgttccacttcccgctgatgccgcgcatctacatgtcgatcgcgagcgaggatcgcttcccgatcgtcgacatcatgcggcagacaccggaactcgcaccgagcaaccagtgggccgtgttcctgcgcaaccacgacgagctgacgctcgagatggtcaccgactccgagcgcgatctgttgtggcagacctatgcgagcgaccggcgcgcgcggctgaacctcggcatccggcgccggctcgcgccgctgatggaacgcgaccggcgccgcatcgagctgatcaactcgctgctgctgtcgatgccgggcacgccggtgatctactacggcgacgaactcgggatgggcgacaacatccacctcggcgaccgcgacggcgtgcgcacgccgatgcagtggtcgtcggatcgcaacggcggcttctcgcgcgccgacccggaactgctcgtgctgccgccggtgatgggttcgctgtacggctatgacgcggtcaacgtcgaggcgcagacacgcgacccgcattcgctgctgaactggacgcgccgcatcctgtcgacgcgccgcgcgtcgcaggcgttcggacgcggcacgatccgcttcctgcgcccggagaaccgcaaggtgctcgcgtacctgcgcgagctggacggcgacgatccggtgctgtgcgtcgcgaacctgtcgcgcgcgtcgcaggccgtcgagctcgacctgtccgaattcgcgggccgcgtgccgatcgagatgacgtcggattcgccgtttccgccgatcggccagctcccgtatctcctcaccttcccgccgtacggattcctgtggttcgtgctcgccgagcatggccgcgagccgtcgtggcggcagccccatgcggagccgctgcccgaatacgtgacgctcgtgatgcggcgcggcgatgcgcggccggacatcgaacagctgcacgtgctcgcgcacgatgcgttgccgtcgtggctcgcgcggcggcgctggttcgcgtcgaaggaccgtgcgatcggcgcggcccggctgaacgtcgtcacgccggtgccgggcgaaccgttccagtatgcggaggcgtgggtcgaatccgatgagccaggcgacgtcgaacgctacgtcgtgccgctcgcggccgcgtggggcggtgaaacctcgcagccgctgttcgcgcagctcgcgctggcgcgtgtgcggcgcggccattcggtcggctacctgaccgacgcgttcgcgctgccggcgttcgcacacgggatgctgcgcaagctgcgcgacggcgcgacggtgccgacctccgatgacggccggctcgcgttcctgccggaagacgcgctcgccgcgctcgatcccggcgacaacgccgacgtgcgctggctcgcggccgagcagagcaacagctcgctcgtgatcggcgacgcgatcgtgctgaaactggtgcgcaaggtcgcgcacggcgtgcatccggaagcggaaatgagccgctacctgacgcggatcggctacccgaacaccgcgacgctcgccggtgaagtcgtgcacgtcgatccggacggcacgccgcatacggtcgcgatcctgcagcgctacgccgacaaccagggcgatgcgtggacgcgctcgttcgatttcctgcgccgcgcagtggacgagctcgcgctgccggccgcggacgaagaagagcccgacgatacggacgaggaacccgacgcgctgctcggctatgcggcgttcgcggggatcatcggcacgcggctcggccagttgcacgtcgcgctcgcgcagccgtccgacgatccggcgttcgcgccggagcacgcgacgcccgaacacgtcgacggctggtgcgcggacgcgatcgcatcgttcgaacacgcgctcgacgtgctgcacacgcggctcgatgcgctcgatcccgcgacgcgcgcggcggccgacacgctgctcgcgtcgcgcgatgcggccgtgcgcgcgctcggcgagctcgtgccgcgcacgctcgatgcgcaatgcatccggatccacggcgatttccatctgggccaggtgctcgacgtgcagggcgacgcgctactgatcgacttcgaaggcgagccggcacgcccgctcgagcggcgccgcgcgaaatcgcatccgctgcgcgacgtggccggcctgctgcggtcactgtcgtatgtgagcgcaatcgcgcaattcgcgatcgagaaggcgccaccgcaggcggccggccgcaagcgcgcgctgttcgaccgcttcgggcaggccgccgccgaccgcttcgtcgactgctatcgcgcggccgccgaactcgcccccgcgcgtttcgtcgacccgcgctacgcctatcgcctgctcgcgctgttcctgatcgacaaggcgtcgtacgagctgtgctacgaagccgcgaaccggcccgactggctaagcgtgccggtcggcgggctcgcggcgctggtcgaacggctgctcgatggcggcgccgcctccgacgacggagacacgccatga

SEQ ID NO: 234 - protein, 1138 aa, Burkholderia cepacia R18194
MMKREDSLDDVRRAQFPSLAPGGTPRRRRARRRAPALCADDPLWYKDAIIYQVHVKSFYDSNNDGIGDFPGLIAKLDYIAELGVDTIWLLPFYPSPRRDDGYDIADYRDVHPDYGTLADVRRFIREAHARGIRVITELVINHTSDQHPWFQRARRAKPGSTHRDYYVWSDTDTKYAGTRIIFLDTETSNWAHDPVAGQYYWHRFYSHQPDLNFDNPAVVREVMQVMRFWLDLGIDGLRLDAVPYLVAREGTNNENLPETHAILKRIRATIDAEYPNRMLLAEANQWPEDVQEYFGDEDECHMAFHFPLMPRIYMSIASEDRFPIVDIMRQTPELAPSNQWAVFLRNHDELTLEMVTDSERDLLWQTYASDRRARLNLGIRRRLAPLMERDRRRIELINSLLLSMPGTPVIYYGDELGMGDNIHLGDRDGVRTPMQWSSDRNGGFSRADPELLVLPPVMGSLYGYDAVNVEAQTRDPHSLLNWTRRILSTRRASQAFGRGTIRFLRPENRKVLAYLRELDGDDPVLCVANLSRASQAVELDLSEFAGRVPIEMTSDSPFPPIGQLPYLLTFPPYGFLWFVLAEHGREPSWRQPHAEPLPEYVTLVMRRGDARPDIEQLHVLAHDALPSWLARRRWFASKDRAIGAARLNVVTPVPGEPFQYAEAWVESDEPGDVERYVVPLAAAWGGETSQPLFAQLALARVRRGHSVGYLTDAFALPAFAHGMLRKLRDGATVPTSDDGRLAFLPEDALAALDPGDNADVRWLAAEQSNSSLVIGDAIVLKLVRKVAHGVHPEAEMSRYLTRIGYPNTATLAGEVVHVDPDGTPHTVAILQRYADNQGDAWTRSFDFLRRAVDELALPAADEEEPDDTDEEPDALLGYAAFAGIIGTRLGQLHVALAQPSDDPAFAPEHATPEHVDGWCADAIASFEHALDVLHTRLDALDPATRAAADTLLASRDAAVRALGELVPRTLDAQCIRIHGDFHLGQVLDVQGDALLIDFEGEPARPLERRRAKSHPLRDVAGLLRSLSYVSAIAQFAIEKAPPQAAGRKRALFDRFGQAAADRFVDCYRAAAELAPARFVDPRYAYRLLALFLIDKASYELCYEAANRPDWLSVPVGGLAALVERLLDGGAASDDGDTP

SEQ ID NO: 235 - DNA, 1776 bp, Listeria monocytogenes str. 4b H7858
  CDS (1)..(1776): transl_table=11
atggaaaaagcagggatttatcatcaaccagcgagtagctatgcttatagttatgacgctaaaacactacatattcggattagaacgaaacgcttggatattagcgaggttactctaattgctgccgacccttacttatggaaagatggaaaatggcaaagtgaatcttatacaatgcgcaaaatcgcagaaacagaagagcacgattattggttttttgcaattacaccagaacatagacgtcttcaatatggctttttactaacagatacagaaggagaaacaacattttacggcggacgtggtttctttgagccaactgaggctaatttagctacgatggattattactttaaatttccatttatccatgcggtggatacttttgaggcgcctgaatgggttgggaatactatttggtaccagattttcccagaacgttttgcaaatgggaatccggctatttctccggaaaatgccttgccgtggggaagtaaagatccgaacacaacagactttttcggcggggatatagaaggaattatcgagcatttagattatttagcagagcttggtattaatggggtttatttgacacctgtgtttgaagcaccaaccaatcataaatacgatacggttgattataaaaaaattgatccacattttggagataaagaaacgtttagaaaattagttcaggaagcgcataaacgtgggattcgcattatgttagatgcggtgttcaatcacattggcgatacttcagcagagtggcaagatgttgtcttaaatgaagaaaaatctgcatatcgtgattggttccacatccatagtttccctgttcgtcaaaatgaaaatggcaatattgaaggagaaccaacactttcttacgatacatttgctttcacgacgcatatgccaaaattaaatacggctaacccagaagttcagaagtatctactggatattgcaacttactggattcgcgaatttgacattgatggttggcgcttagatgttgctaatgaagtagatcatgctttctggaaagaatttaaaaaggctgtccaagcggaaaaagaagatatttatattcttggtgaaatttggcatgattcgtggatttggttacttggagatgaattccacgccgtaatgaactatccatttacacaaacgattattgagaactttattgaagaaaaaatcacaccggagcaaatggtttctggtattaatgaacaatatatgcgctacccaaatcaagtgaatgaagtaatgtttaatatgcttgatagccatgatacggcgcgtattttaactcgtgctaataatgatgaggataaagtgaaacaagcgcttgccttcatgttcgcgcacactggttcgccgtgtatttattacggaactgaaatcggcatggacggaggaaatgacccaggttgccgtaagtgtatggaatgggatgaaacgaagcaaaaccaagatatgctagcgtttacgaaacaattaattgccctaagaaaagataaccaagcaattatcacatccggcgaattaacttggctaggtgcaagtagcgaaacgggcattacagcattttctaaagaattaaatggtgaaaaactgcatttccttttcaatcaagcaaaagaagataaagatttcacaatttcatttgaaaatacagcgacagatatttggaacaaccgagctgtaacagaaaatcttgttgtcccagcaaaaggatttcttgttgttaaagaaaacagctaa

SEQ ID NO: 236 - protein, 591 aa, Listeria monocytogenes str. 4b H7858
MEKAGIYHQPASSYAYSYDAKTLHIRIRTKRLDISEVTLIAADPYLWKDGKWQSESYTMRKIAETEEHDYWFFAITPEHRRLQYGFLLTDTEGETTFYGGRGFFEPTEANLATMDYYFKFPFIHAVDTFEAPEWVGNTIWYQIFPERFANGNPAISPENALPWGSKDPNTTDFFGGDIEGIIEHLDYLAELGINGVYLTPVFEAPTNHKYDTVDYKKIDPHFGDKETFRKLVQEAHKRGIRIMLDAVFNHIGDTSAEWQDVVLNEEKSAYRDWFHIHSFPVRQNENGNIEGEPTLSYDTFAFTTHMPKLNTANPEVQKYLLDIATYWIREFDIDGWRLDVANEVDHAFWKEFKKAVQAEKEDIYILGEIWHDSWIWLLGDEFHAVMNYPFTQTIIENFIEEKITPEQMVSGINEQYMRYPNQVNEVMFNMLDSHDTARILTRANNDEDKVKQALAFMFAHTGSPCIYYGTEIGMDGGNDPGCRKCMEWDETKQNQDMLAFTKQLIALRKDNQAIITSGELTWLGASSETGITAFSKELNGEKLHFLFNQAKEDKDFTISFENTATDIWNNRAVTENLVVPAKGFLVVKENS

SEQ ID NO: 237 - DNA, 1533 bp, Listeria monocytogenes str. 1/2a F6854
  CDS (1)..(1533): transl_table=11
ttggagttttggcgtcgtagtgtgttttatgaaatttatatgaaatcatttcaagatagtaatggtgatggtttgggtgattttaaaggtttaacgagcagattagattatctggtggatttgggaattgatggtatttggctgactccattttatccttcaccgcaagtagataatggctatgatgtttcggattactgtgacataaatccggattacggcgatatgactgattttcgagcgtttatgaaagcggcggattcacgaggaataaaagttattatcgacttagtgttaaatcattcatcaacagagcatgcttggtttaaggaatcgcgtagtagtaagacgaattctaaacgagattattatatttggagagaaaaaccaaataattgggagtcgttttttggtggttctgcttgggaaatggatgaacttactggcgagtactactatcatagttttgcaaaagaacaggctgacttaaactgggcgaatgaagctgttcgcgcagaaatagaggaagttttagcgttttggttgaatgaaggagtggcggggttcaggttagatgttatcaataatttaacgctcgcacttgaatttccggataatccagtcgcatctggtgaaatggagcatgtttatgaccgtaatcagaatggattagaacaagcgttagaggatatcgcttccttttgtcgaaaagagcgcgacgtgtttttagtaggcgaaattagctcggataaattacctgaaattacgcgatatagctcgaaaaaaatgctagatgtcacgtttaattttaattttggcagtgttgatcagctagatgcagaatctgtatttacgacattgaatgagatggaaacggcattaaacgaagggcagtggccgacgcttttctttggaagtcatgatatgagcaggttcagaagtcgcctcgcatctggagacttagtaaagacccaattgctcgcatttttgatgttaactgcgaaaggcgtgccgtttatatactacggagaagaggtgggtatgcctgatttaacgttttcttccgtaaaagagatgcgcgatattcaaggaacagccgcgtactatcgagctttacaaactggtacagataaaaaacaagcactcgaaatcgctattgaaaaaacgcgtgacaaagcacgtgggccgatgattttcccagatggaaagccatttactctaggtgaaccatggattaaaatggctactttgccggaagaagaagcacggatgatgtgggatttttatcgagctttactcgcatttcgtaaagaaaatgattttaaagagatggaatatacttttttgaagttggatggagaagtactcagttatcagcgaggtgaatttatctttttacttcattttggtgaggaagaggtaacttatctgcttcaggggaactatcagcttgtttttggagaagcgatgatggtagaaaatggtattagaatgggcgcgcatactggaattgcgcttagagtggaggaataa

SEQ ID NO: 238 - protein, 510 aa, Listeria monocytogenes str. 1/2a F6854
MEFWRRSVFYEIYMKSFQDSNGDGLGDFKGLTSRLDYLVDLGIDGIWLTPFYPSPQVDNGYDVSDYCDINPDYGDMTDFRAFMKAADSRGIKVIIDLVLNHSSTEHAWFKESRSSKTNSKRDYYIWREKPNNWESFFGGSAWEMDELTGEYYYHSFAKEQADLNWANEAVRAEIEEVLAFWLNEGVAGFRLDVINNLTLALEFPDNPVASGEMEHVYDRNQNGLEQALEDIASFCRKERDVFLVGEISSDKLPEITRYSSKKMLDVTFNFNFGSVDQLDAESVFTTLNEMETALNEGQWPTLFFGSHDMSRFRSRLASGDLVKTQLLAFLMLTAKGVPFIYYGEEVGMPDLTFSSVKEMRDIQGTAAYYRALQTGTDKKQALEIAIEKTRDKARGPMIFPDGKPFTLGEPWIKMATLPEEEARMMWDFYRALLAFRKENDFKEMEYTFLKLDGEVLSYQRGEFIFLLHFGEEEVTYLLQGNYQLVFGEAMMVENGIRMGAHTGIALRVEE

SEQ ID NO: 239 - DNA, 1662 bp, Listeria monocytogenes str. 1/2a F6854
  CDS (1)..(1662): transl_table=11
atgaaagaaaaagactggtggaaaaaaagcgtagtgtaccaaatctatccaaaaagttttaatgattcgaatggcgatggagtcggtgatattcaaggaattatcgagaaattagattatttaaaagagcttggcgtggacgttatctggttgtcccctgtatacgattcgccacaagacgacaatggttacgatattcgtgattatcaaaaaatttacgaagaatatggcgacatggcgacttttgatcagttacttcaaggtttacacgaccgcgatatgaaactcgtaatggacttagttgtaaaccatacttctgatgaacataagtggtttgaagaatctcggaaatccaaagataacccatatcgcgattactatttctggcgcgaggaaaacgaaatcaacaactggggttccattttcagcggtccggcatgggaattagacgaaaaaacaggcgagtactatttacacctgttctccaaaaaacaacctgatttaaactgggaaaaccctaaattacgccaagatgtatataatatgatgaaattctggctagataaaggcattgatggtttccgcatggacgtaattaattttatttccaaaaacaccgatttcccagatggtccagtgccagatggtcaaatttacggcgatgctggcaatgatttctgcaatggaccgcggattcatgagttcttgcaagaaatgaaccaagaagttacttccaaatacgatgtgatgactgttggtgaaatgcctggtgctagtacaactgacgcgcagatttatacgaatccagcaaataacgaagtcgatatgatttttacatttgaacatatgaacttagattccgatggcgacaataaatgggatttgaaaccaatttacttaccagatttaaaagaaaacatgtccgaatggcaagtggcgcttcaagaaaatggctggaacagcttatactggaacaatcatgaccaaccacgaatcgtttctcgcttcggaaatgacaatcgtttccgcgttcgttcagcgaaaatgctcgcaacttgtctgcatatgatgaaaggaacgccgtacatttatcaaggtgaagaaatcgggatgacgaatgttcattttgaaacgctagatgattatcgtgatatcgaaacgctaaacatgtacaaagaacgcaaagagcaaggccacagtcacgaaagcatcatgcagtcgatttacacaaaaggtcgcgacaatgcgagaaccccttatcagtgggataatagcgagaatgctggcttcacaaccggaacgccttggcttaaagtcaacccgcgctatacagaaatcaacaacgaagaagcgctgaaaaaccctgattccattttctactactaccaaaatcttattaagttacgaaaaacgactgaaatcatcacaaccggtaattatcgcctgttattacctaaagacgaagcgattttcgcatatgaacgctacacagaaaatgaaaaattagttgttttatgtaatttcacagaagaagaacaagttatttttgatgaaaacattttgaacgaactccaaaaaggttccgtgcttgtaaacaatgttccaaatattatagaaggaactttacgaccttacgaagcaatcgtttatcaaatcaagtaa

SEQ ID NO: 240 - protein, 553 aa, Listeria monocytogenes str. 1/2a F6854
MKEKDWWKKSVVYQIYPKSFNDSNGDGVGDIQGIIEKLDYLKELGVDVIWLSPVYDSPQDDNGYDIRDYQKIYEEYGDMATFDQLLQGLHDRDMKLVMDLVVNHTSDEHKWFEESRKSKDNPYRDYYFWREENEINNWGSIFSGPAWELDEKTGEYYLHLFSKKQPDLNWENPKLRQDVYNMMKFWLDKGIDGFRMDVINFISKNTDFPDGPVPDGQIYGDAGNDFCNGPRIHEFLQEMNQEVTSKYDVMTVGEMPGASTTDAQIYTNPANNEVDMIFTFEHMNLDSDGDNKWDLKPIYLPDLKENMSEWQVALQENGWNSLYWNNHDQPRIVSRFGNDNRFRVRSAKMLATCLHMMKGTPYIYQGEEIGMTNVHFETLDDYRDIETLNMYKERKEQGHSHESIMQSIYTKGRDNARTPYQWDNSENAGFTTGTPWLKVNPRYTEINNEEALKNPDSIFYYYQNLIKLRKTTEIITTGNYRLLLPKDEAIFAYERYTENEKLVVLCNFTEEEQVIFDENILNELQKGSVLVNNVPNIIEGTLRPYEAIVYQIK

SEQ ID NO: 241 - DNA, 3342 bp, Pseudomonas fluorescens PfO-1
  CDS (1)..(3342)
atggcgaagaaacccaaggcagccaccttcatcaaggacccgctctggtacaaggacgcggtcatctatcaagttcacgtcaaatcctttttcgattcgaataacgacggaatcggcgactttcccggcctgatcgccaaactcgattacatagccgatcttggcgtcaacaccatctggctgttgccgttctacccctcgccacgccgcgacgacggttacgacatcgccgagtaccgaggcgtgcacagcgattacggaacgatggccgacgccaagcgtttcattgccgaggcgcataaacgcgggttgagggtcatcaccgagctggtcatcaaccacacgtccgatcagcacccgtggtttcagcgcgcgcgcaaggccaagcccggttcggccgcgcgggacttctatgtgtggtcggatgacgaccagaaatacgacggcacccggatcatttttctcgacaccgaaaagtccaactggacctgggatccggtggccggtcagtacttctggcaccgcttctattcgcaccagccggatctcaacttcgataacccgcaagtcatgaaagccgtgctgtcggtcatgcgctactggctggacatgggcatcgacggcctgcgactggatgcgattccgtacctgatcgaacgcgacggcaccaacaacgaaaacctcccggaaacccacgacgtcctcaagcagatccgtgccgagatcgacgccaactaccccgatcgcatgctgctggccgaagccaatcaatggccggaagacacccagctgtacttcggcgacaccgacgccgagggcgtgaatggtgacgagtgtcacatggcgttccacttcccgttgatgccgcgcatgtacatggcgctggcccaggaagatcgcttcccgatcaccgacatcctgcgtcagaccccggaaatcccggccaactgccaatgggcgattttcctgcgcaaccacgatgagctgacgctggagatggtgaccgacaaggagcgcgactacctgtggaactactacgccgctgaccgtcgtgcgcggatcaaccttggcatccgccgccgtctggcgccgttgatggagcgtgaccgccgccgcatcgagctgctgaacagtctgctgttgtcgatgcccggcacgccgaccctgtattacggcgatgaaatcggcatgggcgacaacatctacctcggcgaccgcgacggtgtacgcacgccgatgcaatggtcgatcgaccgcaacggcggtttctcccgcgccgatccagccagtctggtactgccgccgatcatggacccgcaatacggttatcaatcggtcaacgtcgaaacccaggccggtgacccgcattcgctgctgaactggactcgccgcctgctggcggtgcgcaagcaatccaaggcattcgggcgcggcacgctgaaaatgctttcgccagccaaccgccgggtgctggcctacacccgtgaatacaccgggccggacggcaagcacgaaatcattctgtgcgtggccaacgtgtcacgcagtgctcaggcagtggagctcgacctgtcggcctacgttggcatggtgccggtggagatgctcggcggtaacgccttcccgcccatcggccagttgagtttcctgctgaccctgccgccttacggtttttactggttcggcctggcggcggaaaaccagatgccgagctggcacgtcgaaccggcgcagagcctgccggacttcaccacgctggtactgaaaaaacgcatggaagagctgctcgaagcgccgtcccgggccaccctcgagcaggcgattctgccgagctggctgcagaaccgccgctggttcgccggcaaggatgctgatatcgaacaggtgaaactggcctacggcgtgcgcttcggcgatgcacagcatccggtgctgttcagcgaaatcgaagtgcagagcggcgggcagaccagtcgttatcaattgccgttcggctttatttcggaagatcaggtcgggccggcgttgccgcaacaactggctttggcgcgggtacgccgggtgcgtcaggtcgggttgattaccgatgccttcagtcttgaagcgtttattcgcgctgtgctgcaaggcatgcagggcggcacggtgctcgaatccattgagggcgagatccgtttcgaggcaacgccgcaactggaaaaacttggcctgggcgcagagtccgaagtgcgctatctgtccgccgagcaatccaacagttcggtggtgatcggcaacagtctggtgctcaagctgatccgcaaagtcgcttctggcgtacacccggaactggagatgagcgcttacctgaccgctgctggatttgccaatatctctccgctgctgggctcggtgattcgccgcgacgggaagggcgaggacaacttgctgatgattgcgcagggctatctgagcaatcagggcgacgcctgggaatggacgcagaacaacctcgaacgggcgctgcgcgacgagctggccgacgccgtgtccgagcaggcgcagcactacaacgccttgggtgaactgaaggatttcgccgggatgctcggccagcgtctgggggaaatgcatcaggtgctggcagcgccgagcgacaaccaggacttcgcgccgcaagtcagttcggccaaggatgcgcaggcgacgggtaaggatgtcgcggcgcaggtcgagcatgccctgaagctgctcaaacagcatcagggcgagctcgatgcggcggatcagaagctggtcggtcggctactcgaccacaagaaagccatccttgcccacgtgcaggaactggccaagcaatccgccggcggtctacggattcgtgtgcacggcgacctgcatttgggacaggtgctggtaatcaagggcgatgcctacctgatcgacttcgagggcgaaccggcgcggccactggccgagcgccgtggcaagcacagtccgtacaaggacgtcagcggagtgctgcgctccttcgactatgccgccgcgatggcgctgaatgtacacaacgtcgacaacagccccgaggccgaagccgcgcgtcggcgggtcacggagcgttacctgcgtgaagcccgggaagcatttctccaggcatatcgccaagcggcagctagtcttgatcatgcctggcaagatcctgaaggtgccgacgccgcactggcgttgttcggtctggagaaagcggcctacgaagtggcctatgaagccgaaaatcgccccacctggctgcccgtgccgctgcacggtctgtatgggttattgacggggctcaaacccttttccgatcttggtggagagtag

SEQ ID NO: 242 - protein, 1113 aa, Pseudomonas fluorescens PfO-1
MAKKPKAATFIKDPLWYKDAVIYQVHVKSFFDSNNDGIGDFPGLIAKLDYIADLGVNTIWLLPFYPSPRRDDGYDIAEYRGVHSDYGTMADAKRFIAEAHKRGLRVITELVINHTSDQHPWFQRARKAKPGSAARDFYVWSDDDQKYDGTRIIFLDTEKSNWTWDPVAGQYFWHRFYSHQPDLNFDNPQVMKAVLSVMRYWLDMGIDGLRLDAIPYLIERDGTNNENLPETHDVLKQIRAEIDANYPDRMLLAEANQWPEDTQLYFGDTDAEGVNGDECHMAFHFPLMPRMYMALAQEDRFPITDILRQTPEIPANCQWAIFLRNHDELTLEMVTDKERDYLWNYYAADRRARINLGIRRRLAPLMERDRRRIELLNSLLLSMPGTPTLYYGDEIGMGDNIYLGDRDGVRTPMQWSIDRNGGFSRADPASLVLPPIMDPQYGYQSVNVETQAGDPHSLLNWTRRLLAVRKQSKAFGRGTLKMLSPANRRVLAYTREYTGPDGKHEIILCVANVSRSAQAVELDLSAYVGMVPVEMLGGNAFPPIGQLSFLLTLPPYGFYWFGLAAENQMPSWHVEPAQSLPDFTTLVLKKRMEELLEAPSRATLEQAILPSWLQNRRWFAGKDADIEQVKLAYGVRFGDAQHPVLFSEIEVQSGGQTSRYQLPFGFISEDQVGPALPQQLALARVRRVRQVGLITDAFSLEAFIRAVLQGMQGGTVLESIEGEIRFEATPQLEKLGLGAESEVRYLSAEQSNSSVVIGNSLVLKLIRKVASGVHPELEMSAYLTAAGFANISPLLGSVIRRDGKGEDNLLMIAQGYLSNQGDAWEWTQNNLERALRDELADAVSEQAQHYNALGELKDFAGMLGQRLGEMHQVLAAPSDNQDFAPQVSSAKDAQATGKDVAAQVEHALKLLKQHQGELDAADQKLVGRLLDHKKAILAHVQELAKQSAGGLRIRVHGDLHLGQVLVIKGDAYLIDFEGEPARPLAERRGKHSPYKDVSGVLRSFDYAAAMALNVHNVDNSPEAEAARRRVTERYLREAREAFLQAYRQAAASLDHAWQDPEGADAALALFGLEKAAYEVAYEAENRPTWLPVPLHGLYGLLTGLKPFSDLGGE

SEQ ID NO: 243 - DNA, 1629 bp, Rhodospirillum rubrum
  CDS (1)..(1629)
atgtcgggtcaggaatggtggaaacgggccgttatctatcaaatctatccgcgcagtttccaggatgccgatggcgatggcatcggcgatttggccggcatcgcccaacgcctggattacctgtcgtggctgggggtggacgcgatctggatctcgcccttctatacctcgccgatgaaggatttcggctacgacattcaagactaccgcgatgtcgatccgatcttcggcaccctggccgatttcgacgccctggcggcgcgggcccgcgcgctggggctgaagctgatcttggatttcgttcccaaccacacctctgatcggcatccgtggtttctcgaatcccgccaatcgcccgccagcgccaagcgcgactggtacatctggcgcgacccggccgccgatggcggcccgccgaccaactggctggccgaattcggcggcagcgcctgggaatacgacgaagccagcggccagtattactaccacgccttcctcaaggagcagcccgacctcaattggcgcaatccagaagtccgcgcggcgatgtatgacgccatgcgcttttggctcgagcgcggggtggatggcttccgcgtcgatgtgatgtggcatctgatcaaggacgaccagttccgcgacaatccgcccaatccggcccgcccgcccaatgccggtccggccaatgccctgatcccgctctacaccgccgatcgccccgaagtgcacgacatcgtgcgcgagatgcgcgccgtggtcgacgcctatcccgaacgcgtgctgatcggcgagatctggctgcccaccgatcgcctggtcacctattacggccatgatctgcgcggtgcccatctgccctttaatttccaattgatcggcgccgcctgggacgccggcgtcatcaaagagatcgtcggcgactacgaaaaggccctgccccggggcggctggcccaattgggtgatgggcaatcacgacaagggccgcatcgccagccgcctgggcccccggcaggcccggctggccatgctgctgctgctcaccctgcgcggcacccccaccctttactatggcgacgagatcgccatgcgcgacgtgccgatcccccccgaccgggtctgcgatccttacgaaaagaacgtgcccggcctgggtctggggcgcgacccccagcgcacgccgatgcaatgggaggacgctccccaggccggcttcacccgcgcttcccgatcctggttgccgatcgccgccgatgcctcaacggtcaatgtcgccgcccaacgcgcggcgccggcctcgatgctgaccctcgtccaccgcctgatcgccctgcgcaaagccgaagcggccctaactatcggcgattatggggcgctcgacgctcccgagcgggtggtgatgttcctgcgccgcgttcccgggcgccgcctgctcatcgccctcaatctgggggaaagcgcccaaagcctgagcctgcccggcgacagccgccaagccaccaccctgctgtccaccgacccggagcgcccgctgggcgatctggccccggccttcacccttggcgggggcgagggcatcgtcgttttgctggccgaccgggaaacggcccccccgtccccggcggcgtaa

SEQ ID NO: 244 - protein, 542 aa, Rhodospirillum rubrum
MSGQEWWKRAVIYQIYPRSFQDADGDGIGDLAGIAQRLDYLSWLGVDAIWISPFYTSPMKDFGYDIQDYRDVDPIFGTLADFDALAARARALGLKLILDFVPNHTSDRHPWFLESRQSPASAKRDWYIWRDPAADGGPPTNWLAEFGGSAWEYDEASGQYYYHAFLKEQPDLNWRNPEVRAAMYDAMRFWLERGVDGFRVDVMWHLIKDDQFRDNPPNPARPPNAGPANALIPLYTADRPEVHDIVREMRAVVDAYPERVLIGEIWLPTDRLVTYYGHDLRGAHLPFNFQLIGAAWDAGVIKEIVGDYEKALPRGGWPNWVMGNHDKGRIASRLGPRQARLAMLLLLTLRGTPTLYYGDEIAMRDVPIPPDRVCDPYEKNVPGLGLGRDPQRTPMQWEDAPQAGFTRASRSWLPIAADASTVNVAAQRAAPASMLTLVHRLIALRKAEAALTIGDYGALDAPERVVMFLRRVPGRRLLIALNLGESAQSLSLPGDSRQATTLLSTDPERPLGDLAPAFTLGGGEGIVVLLADRETAPPSPAA

SEQ ID NO: 245 - DNA, 3303 bp, Rhodospirillum rubrum
  CDS (1)..(3303)
atgagcgacttcctatggtacaaggacgccatcgtctatcagcttcatgtaaaagccttttttgattcgaacggtgacgggttcggcgatttcaaggggctgaccgaaaagctggattacctctccgatcttggggtgacggcggtgtggatcttgccgttctatccctcgccgctgcgcgatgacggctatgacatcgccgattacaaggccatccaccgcgcctatggcaccatgggcgatttccgccgcttcgtgcgcgaggcccatgagcgcgggttgaaggtcatcaccgaactggtgatcaatcacaccagcgatcagcacgcctggttccagcgcgcccgcgaagccaagcccggcagcaaggcccgcgacatgtacgtgtggtccgacaccgaccagcgctatttggatacgcgcatcattttcaccgataccgaaacctcgaactgggcctgggatccgctggccaaggcctattactggcaccgcttcttcgcccatcagcccgatctcaactgggacaatccgcgaattttcgaggagatcacccgggtgatgaagttctggcttgattgcggcgtcgatggcatgcgcctggacgccattccttatttggtcgaacgcgacggcacgaataacgaaaacctgcccgaaacccatgtcgtcctcaagcggctgcgcgcttggcttgatgcccattatgaagaccggatgttcctggccgaggccaatcaatggcccgaggacgtgcgcgagtatttcggcgaagccggcgacgaatgccacatggccttccactttccggtgatgccgcgcatctatatggccgtggcccaggaagaccgccatccgatcaccgatatcatgcgccagaccccggagatcccagcggcttgccaatgggcgatcttcctgcgcaatcacgatgaactgacgctcgaaatggtcaccgaccgcgagcgcgactatatgaacaccttctatgccaatgattcgcgggcccgaatcaacgtcggcatccgtcggcgcctggcgcctttgcttgataacgatcgccgcaagatcgaattgctcaacagccttttgatgtcgatgccgggtacgccgatcatctattacggcgacgagatcggcatgggcgacaatattttcctgggcgatcgcgatggcgtgcgcacgcccatgcaatggtcgcccgaccgcaacggcggcttttcgcgggccgatcccgcctcgctttatctgccgacgatcatggatgcggtctatggcttcttcgccgtcaatgtcgaggcccagtcgcgctcgccatcctcgctgctcaactggatgcgccggctgatcgccgtgcgcaagcgccacccctccttcgggcgcggcaccttgcgctttctctatcccggcaaccgcaagatcctggcttacttgcgggaattcgagggcgaggtgatcttgtgcgtggccaatctgtcgcgtgccccgcagccggccgaattggggctggccgagttttccgggcgggttccggtcgagatgctgggcaacagcgtctttccgccgatcggcgagttgcactatttcatcaccctgccggcctatggcttctattggttccgcctgtcgaagggcgaggggccgagctggcatgaaccgccggtcgagcccttgcccgatctttcgaccctggttcttccccgtatctgggacagcctgggcagcgatgggcccttgcgccagatccagggggatatcctgccggccttcctgcccaagcaacgctggttctctggcaaggagcattccctgcgcggcgtcgagatgaccgaccacgcggtgatttcggcccccggcgccgcttcgggctggatgctcgccctgtggcgcgccgattacaaggatggcgccccggggcaaaccttccaattgccccttgatatcgcctgggaaagtcgcgaggacgatcccttgtcccggctgctgccctttaccttggcccgggtgcggcgggtcaaccgcgttggcgccctctatgacgccatggccggcccggctttcccgctcgccttggtgcaggcgatggccgaaggcgcgaacgtgacgacggccaagggcggcggtttgcgcttcacccggacccaggccttccccgccggcccgcttcccggccccgaagcggtggcccgcctggggcgtgagcaatccaacacctcgatcaaacttggcgaggatatggttctcaagctctatcgccgggtcgaggccgggattcatccagaaatcgaaatcggccgcttcctgaccgatgtcgccggcttcgccaacgccccgccgctgcttggcgcgctcgagcatatcgatgctaagggcgccatctcggccctggcggtgctgcagggcttcgtgcgcaatcagggcgatggctgggactacatgctggcctatctcgaccgcttcctcgacgacagggcccaggcgccggccgaggtcggcgagggcggcgggccggccggctcgccccatggcatcatccacgcccaggccgatatccttggccagcgcgtcgccgagcttcaccacgccttcgccaccccgaccgaggacccggccttttccgccgaagccgtcgggccggaggatctggcgagctggcgcgagcaagtgcgcacccaggcggcccaggcccgtcaggcccttgacaccgccttgcccgggctgtccgcagaggtggcggggctggtcacccgactgctggactgctgggagcggatcgacgcccgcgtcgacgcgccgatttctttggccgaggggctggtcaaaacccgcatccatggcgaccttcatctggggcaggtggtggtggtgcgcgatgacttccatattctcgatttcgagggcgagccggtgaagggactgagtgagcggcgcgacaaacactgcccgttgaaagacgtggccggcatgcttcgctcgttcgattacgcggcgtggtcggcggcgctgagcttccgccaaacccatgccgaggtgcggatcgacgtactgcccgcgcttggcgtttggcaggaggaaatccgcgaggctttcctcgccggctatgaccgggccatcgccggatgtccctcggttccggcccttgaggaggggcgaagggacctcctttcactattcatgctggaaaaagccctctatgaggtatcttacgaagccgccaatcgtccggactggttacgaattcccatcggcggcgttttgcgcctgcttggagaggggccatcggacgagatcaaaccgcgttga

SEQ ID NO: 246 - protein, 1100 aa, Rhodospirillum rubrum
MSDFLWYKDAIVYQLHVKAFFDSNGDGFGDFKGLTEKLDYLSDLGVTAVWILPFYPSPLRDDGYDIADYKAIHRAYGTMGDFRRFVREAHERGLKVITELVINHTSDQHAWFQRAREAKPGSKARDMYVWSDTDQRYLDTRIIFTDTETSNWAWDPLAKAYYWHRFFAHQPDLNWDNPRIFEEITRVMKFWLDCGVDGMRLDAIPYLVERDGTNNENLPETHVVLKRLRAWLDAHYEDRMFLAEANQWPEDVREYFGEAGDECHMAFHFPVMPRIYMAVAQEDRHPITDIMRQTPEIPAACQWAIFLRNHDELTLEMVTDRERDYMNTFYANDSRARINVGIRRRLAPLLDNDRRKIELLNSLLMSMPGTPIIYYGDEIGMGDNIFLGDRDGVRTPMQWSPDRNGGFSRADPASLYLPTIMDAVYGFFAVNVEAQSRSPSSLLNWMRRLIAVRKRHPSFGRGTLRFLYPGNRKILAYLREFEGEVILCVANLSRAPQPAELGLAEFSGRVPVEMLGNSVFPPIGELHYFITLPAYGFYWFRLSKGEGPSWHEPPVEPLPDLSTLVLPRIWDSLGSDGPLRQIQGDILPAFLPKQRWFSGKEHSLRGVEMTDHAVISAPGAASGWMLALWRADYKDGAPGQTFQLPLDIAWESREDDPLSRLLPFTLARVRRVNRVGALYDAMAGPAFPLALVQAMAEGANVTTAKGGGLRFTRTQAFPAGPLPGPEAVARLGREQSNTSIKLGEDMVLKLYRRVEAGIHPEIEIGRFLTDVAGFANAPPLLGALEHIDAKGAISALAVLQGFVRNQGDGWDYMLAYLDRFLDDRAQAPAEVGEGGGPAGSPHGIIHAQADILGQRVAELHHAFATPTEDPAFSAEAVGPEDLASWREQVRTQAAQARQALDTALPGLSAEVAGLVTRLLDCWERIDARVDAPISLAEGLVKTRIHGDLHLGQVVVVRDDFHILDFEGEPVKGLSERRDKHCPLKDVAGMLRSFDYAAWSAALSFRQTHAEVRIDVLPALGVWQEEIREAFLAGYDRAIAGCPSVPALEEGRRDLLSLFMLEKALYEVSYEAANRPDWLRIPIGGVLRLLGEGPSDEIKPR

SEQ ID NO: 247 - DNA, 3465 bp, Burkholderia fungorum LB400
  CDS (1)..(3465)
atgaagcgtgacgatccagcccaaaccacgtcgcaagcccactcgagcgccgccaccggcggcgtcgcgaaagcgcgcacgcatcggcgcggcaaacccgcggccttgagcgacgatccgctctggtacaaagacgcgatcatttaccaggtgcacatcaagtcattcttcgacgcgaacaacgacggcgtcggcgactttcccggcctgatcgcgaagctcgactacatcgccgaactcggtgtgaacgcgatctggctgctgccgttctatccgtcgccacggcgcgacgatgggtatgacattgccgattaccgcaacgtgcatccggactacggcaatctgtccgacgtaaagcgcttcattcaggaagcgcacgcacgcggcattcgtgtgattaccgaattggtgatcaaccacacgtcggaccagcatccgtggtttcagcgcgcgcgccgcgcgaagccgggttcgaaccaccgtaactactacgtgtggtccaacaccgatcagaagtatctggaaacgcggatcatcttcatcgattcggagccgtccaactggacgcacgatccggtagcgggcgcgtattactggcaccgcttctactcgcatcagcccgatctgaatttcgacaatccggccgtgttgagggaggtgctgcaggtcatgcgcttctggctcgatatgggcatcgacgggttacggctcgacgcggtgccgtatctggtggaacgtgaaggcaccaacaacgagaacctgccggaaacgcacgcggtgctcaagaagattcgcgccacgatcgacgccgaatatccgaaccggatgctgctcgccgaagccaaccagtggccggaagacgtgaaggaatatttcggcgacgaagacgaatgccacatggcgttccacttcccgctgatgccgcgcatctacatgtcgattgcgagcgaagaccgcttcccgatcaccgacatcatgcggcaaacaccggacctcgccgaaacgaaccagtgggcgattttcctgcgcaatcacgacgaactgacgctggaaatggtcacggattccgagcgcgactatctgtggaacacctacgcgagcgatcgccgcgcgcgcctgaatctcggcattcgccgccgtctcgcgccgttgatggaacgcgaccgccgccgtatcgagctgatcaattcgctgctgctctccatgcccggcacgcccgtgatctattacggcgacgaactcggcatgggcgacaacattcacctcggcgaccgcgacggcgtgcgcacgccgatgcaatggtcatcggaccgcaacggcggtttttcgcgcgccgaccctgagcaactcgtgctgccgccggtcatgggctcgctgtatggtttcgacgcggtgaatgtggaagcgcaaagccgcgacccgcattcgctgctgaactggacccggcgcatgctcgccacgcgtcgcgcgaagcagactttcgggcgcggcacgatccgtttcctgaagccggaaaaccgcaagattctcgcgtacctgcgcgagatgccgggcgagccgccgattctctgcgtggcgaatctctcgcgcgcgccgcaagcggtggagctcgatctgtccgaattcgacggctccgtgccgatcgaaatgaccgcggactccgtgttcccgccgatcggccaactgacgtatctgctgacgttcccgccgtacggcttcctgtggttcatgctgtgccccggcggccaacgtcctacctgggctcaagcgccttctgagccgctgcctgaattcgtcacgatcgtgattcgcgaaggccaggtcggtccgacgccggagaacgtgcgcctgctcgaatcggaagtgctgccttcatggctgagccggcgccgctggtttgcgtcgaaggatcagaagctcaatgcggtgcggctcgcggcattgaccacgattccgaacggcggctttgcgttcaccgaaatcgaagcggacgtgggcaagcataccgaacgctacgtggtgccgatcgcgattacgtggggcggcgaaaccactttcccgctgttcaagcaactggcgttggctcgcgtgcgacgcggccgcaatgtcggtcatctgacggacgcgttcgccctgccgatcttcgctcatggcgtgatgcgcaagctgcgcgaacgcgccgtggtgccgaccgtgcagaagagcgaaatcaggttcctgccgaccgaacgtttcgccgaactcgaaggactcggcgaacggcccgagatccgctggctcgcggcggagcagagcaacagttcgctgatcatcgcggacgccgcggtgctgaaactggtgcgccgtctcgtgagcggcattcatccggaagccgaaatcagccgctatctgacgcaattgggctatgcgaacaccgcgccgctgtatggcgaagtggtgcgcgtggatccggaaggcgtgccgcacaccctctgcattctgcaaggctatatcgacaatcagggtgacgcgtggaactggtcgctcgactatctgcgccgctcggtggacgaactcgccattgccgtcgataccgaaacgcagtcggtgccggaccgttccaacgaggcgattctggtggaaggctacagcacgctggccggcatcatcggcagacgcctgggcgaactgcacgtggcgctcgcctcgccgacggacgacccggcattcgcgccggaacccgccagcgcggagcaggtgaaggcatgggtcgacggcacgcaggccatgctcgccagcgcgctggatctgctcgcgccgcgtatcgagcagatgagcgatacggaaacccgggcgctggcgcagagcctgatagaccgtcgtgcggcattggttgccgctgtcgactcgctggtttccgccaacgcgggcgcgctgcgcattcgcattcacggcgatttccacctcggccaggtgctggtcgcgcagggcgacgcgtatctgatcgactttgaaggcgagccggcacggacgctcgaacaacgtcgtcagaaatcgagcccgttgcgcgacgtggccggtctgctgcgctcgctctcatatgccagcgcggccgcgcaatccaccacggaagccgcgccgcaacagaccgccgatcgcaagcgcgcgctgttcgaccgtttccgcgcgcatgccgcggagaagttcctcaacgagtaccgcgcggccgctgcggaagcggcaacgccgctcgtcgcgcccgaagccgaacaggccttgctcgatctgttcctgatcgaaaaagccgcgtacgaaatccgttacgaagcggccaaccgcccgacgtggctcagcctgccggtacgcggccttgccgcgctcaccagccgcctgctcggcgataccggcgcgccgggccacgattcctcaaaccaggcgccaggcgccgccacaccgcctaatccggccgagggcgactatgagtga

SEQ ID NO: 248 - protein, 1154 aa, Burkholderia fungorum LB400
MKRDDPAQTTSQAHSSAATGGVAKARTHRRGKPAALSDDPLWYKDAIIYQVHIKSFFDANNDGVGDFPGLIAKLDYIAELGVNAIWLLPFYPSPRRDDGYDIADYRNVHPDYGNLSDVKRFIQEAHARGIRVITELVINHTSDQHPWFQRARRAKPGSNHRNYYVWSNTDQKYLETRIIFIDSEPSNWTHDPVAGAYYWHRFYSHQPDLNFDNPAVLREVLQVMRFWLDMGIDGLRLDAVPYLVEREGTNNENLPETHAVLKKIRATIDAEYPNRMLLAEANQWPEDVKEYFGDEDECHMAFHFPLMPRIYMSIASEDRFPITDIMRQTPDLAETNQWAIFLRNHDELTLEMVTDSERDYLWNTYASDRRARLNLGIRRRLAPLMERDRRRIELINSLLLSMPGTPVIYYGDELGMGDNIHLGDRDGVRTPMQWSSDRNGGFSRADPEQLVLPPVMGSLYGFDAVNVEAQSRDPHSLLNWTRRMLATRRAKQTFGRGTIRFLKPENRKILAYLREMPGEPPILCVANLSRAPQAVELDLSEFDGSVPIEMTADSVFPPIGQLTYLLTFPPYGFLWFMLCPGGQRPTWAQAPSEPLPEFVTIVIREGQVGPTPENVRLLESEVLPSWLSRRRWFASKDQKLNAVRLAALTTIPNGGFAFTEIEADVGKHTERYVVPIAITWGGETTFPLFKQLALARVRRGRNVGHLTDAFALPIFAHGVMRKLRERAVVPTVQKSEIRFLPTERFAELEGLGERPEIRWLAAEQSNSSLIIADAAVLKLVRRLVSGIHPEAEISRYLTQLGYANTAPLYGEVVRVDPEGVPHTLCILQGYIDNQGDAWNWSLDYLRRSVDELAIAVDTETQSVPDRSNEAILVEGYSTLAGIIGRRLGELHVALASPTDDPAFAPEPASAEQVKAWVDGTQAMLASALDLLAPRIEQMSDTETRALAQSLIDRRAALVAAVDSLVSANAGALRIRIHGDFHLGQVLVAQGDAYLIDFEGEPARTLEQRRQKSSPLRDVAGLLRSLSYASAAAQSTTEAAPQQTADRKRALFDRFRAHAAEKFLNEYRAAAAEAATPLVAPEAEQALLDLFLIEKAAYEIRYEAANRPTWLSLPVRGLAALTSRLLGDTGAPGHDSSNQAPGAATPPNPAEGDYE

SEQ ID NO: 249 - DNA, 1821 bp, Thermobifida fusca
  CDS (1)..(1821)
atgaccacacagccggctcctggtgcgcgcccgacgccgaccgggtccgttcccgacacgttcacccacgcaaagccgcgcgacccctactggtacaagcacgcggtgttctacgaagtcctcgtccgcggcttctacgactccaacggggacggcaccggcgacttgcggggcctcatcgaaaaactggactacctgcagtggctcggcatcgactgcctctggctgctgccgatctacgagtccccgctccgcgacggcggctacgacgtctccgactacatgaagatcctgcccgagttcggccggatctccgacttcgtggaactcgtcgaaaaagcccaccagcggggcatccgggtcatcaccgacctggtcatgaaccacaccagcgaccagcacccgtggttccaagcctcccggcacgaccccgacggaccgtacggcaacttctacgtctggtcggacaccacggaacgctacagcgacgcgcgcatcatcttcatcgacaccgagcagtccaactggacctacgacgaagtgcgcggacagtactactggcaccgcttcttctcccaccagcccgacctcaacttcgagaacccggacgtccaggacgccatcctcgaagtgatgcggttctggctggaccttggcatcgacggtttccgcttggacgccgtgccctacctgtacgagcgggaaggcacgaactgcgagaacctcaaggagacccacgagttcctcaaacgcatccgcgccgaagtcgaccggctctaccccgaccgggtcctgctcagcgaagccaaccagtggcccgccgacgtcgtcgactacttcggcgactacgaatccggcggcgacgaatgccacatgaacttccacttcccgctgatgccgcgcatgttcatggcggtccggcgcgaacagcgctaccccatctcggaaatcctcgcgcagaccccgcctattccgcgcaactgccagtgggcgatcttcctgcgcaaccacgacgagctgaccttggagatggtcagcgatgaagagcgggactacatgtactccgaatacgccaaagacccgcggatgcgcgccaacatggggatccgccgccggctggcacccctcctggaaaacgacctcaaccagatcaaactgttcaccgcgctgctgctgtcgctgcccggctccccggtgctctactacggcgacgagatcgggatgggcgacaacatctggctgggggaccgcgacagcgtgcgcacccccatgcagtggaccccggaccgcaacgccggattctcccgctgcgacccgggccgcctctacctgccggtgatcatggacccgatctacgggtaccaggcgatcaacgtcgaagcacagcagaacaacccgaactcgctgctgaactggacccgcaacatgatccagatccgcaagcagcacccggtgttcgggacgggggacttcaccgaactccacgcgagcaaccccagcgtgttcgcgttcgtgcgcgaatacggcgacgaccggatgctgtgcgtcaacaacctgtcccggtttccccaaccggtggaactggacctccgccgcttcgaagggatcaccccgatcgaatgcacggggggagtgcacttcccgcccatcggggaactgccctacctgctgactctccccgggcacggcttctactggttccagcttccgcccgtcgccgaagagcagccgctcgcccagcccgtcaccaccgtccccgcagccccgcagcctcctgctccggcagaccgtcccgcgtccgacccgacccagcggtcctga

SEQ ID NO: 250 - protein, 606 aa, Thermobifida fusca
MTTQPAPGARPTPTGSVPDTFTHAKPRDPYWYKHAVFYEVLVRGFYDSNGDGTGDLRGLIEKLDYLQWLGIDCLWLLPIYESPLRDGGYDVSDYMKILPEFGRISDFVELVEKAHQRGIRVITDLVMNHTSDQHPWFQASRHDPDGPYGNFYVWSDTTERYSDARIIFIDTEQSNWTYDEVRGQYYWHRFFSHQPDLNFENPDVQDAILEVMRFWLDLGIDGFRLDAVPYLYEREGTNCENLKETHEFLKRIRAEVDRLYPDRVLLSEANQWPADVVDYFGDYESGGDECHMNFHFPLMPRMFMAVRREQRYPISEILAQTPPIPRNCQWAIFLRNHDELTLEMVSDEERDYMYSEYAKDPRMRANMGIRRRLAPLLENDLNQIKLFTALLLSLPGSPVLYYGDEIGMGDNIWLGDRDSVRTPMQWTPDRNAGFSRCDPGRLYLPVIMDPIYGYQAINVEAQQNNPNSLLNWTRNMIQIRKQHPVFGTGDFTELHASNPSVFAFVREYGDDRMLCVNNLSRFPQPVELDLRRFEGITPIECTGGVHFPPIGELPYLLTLPGHGFYWFQLPPVAEEQPLAQPVTTVPAAPQPPAPADRPASDPTQRS

SEQ ID NO: 251 - DNA, 1563 bp, Microbulbifer degradans 2-40
  CDS (1)..(1563)
atggataccaatgccgatggtgtgggtgatattccaggaattgtgcaaaagctcgattacatagccagtttaggtgttgatgcgatatggatatcgccattttttaaatcgcctatgcacgactttggctacgacattagcgactatcgcgacgtagacccattatttggcaccttggatgacttcgatctacttatcgatgaagcgcataagcgcggcattaaagtaatgatcgaccaagtgctaagccacacttctgccgagcatgaatggtttaaagagagccgccaatcacgcgataaccccaaagccgattggtatgtttgggccgaccctaatgaagatggcacgccccctaataactggctcgctatttttggcggcagcgcttgggaatgggattcgcgtcgcggtcagtactacctgcataactttttgaaaagtcagccagatttaaacttccactgcgaagatgtacaaaaccaaattttgcaggaagtagagttttggctaaaacgcggtgtagatggcctgcgtttggatgctattaacttttgtttccacgataagcagttgcgcaacaacccgcctaaaagtgcaagtgagcgcaaagcgcgcgggtttagtgaagataacccctacgcttttcagtggcatacctacaacaacacccagccagaaaacctcgcgtttttgcagcgcctgcgcagcttgatggataagtaccccaataccgttaccttgggcgaaatatcttcagacgattcgctggcaacaatggctgagtacaccgccgataacgacaagttacatatggcttacagctttgagctactagccgatgagttttctgcggcttatattcgcgaaaccgttggcacacttgagtcgcgcttaaacgatggctggccctgttggtctattggcaatcacgatgtaccacgtgtggctagtcgctggggcaaagaagatgcatgcgatgcgctttctattgtactcaacgccatgttgctctctttgcgtggcagcgtatgttgttatcagggtgaagagctgggtttgaaagaagccgagctaaccttcgagcaattacaagacccatacggcattaccttctggcccaagtttaaaggtcgcgatggctgccgcacacctatgccgtgggatagccagcaacatgcaggctttagtaacggcgcgccatggctgccagttgcagacgatcacaaagccaaaaacgtgaccgttcagcagcaagcggatttatcggtactacaggcgtacaaacaatttattgcttggcgaaaaacgcagccagaaattttgtacggcgatatcgcgttcctttcgtcgcatgaatccaccttggcgtttacgcgcagctacgaaggcagcacattatttgccgcgtttaatttatctaacaccgaacaagtagtaaacctacctgcaggtgagtggaccgcactggaaggccacggccttagcgccgcagtgagtgccactcaaatcacattacctccttttggcggttttttcgccaagcaggcaagcaacagttag

SEQ ID NO: 252 - protein, 520 aa, Microbulbifer degradans 2-40
MDTNADGVGDIPGIVQKLDYIASLGVDAIWISPFFKSPMHDFGYDISDYRDVDPLFGTLDDFDLLIDEAHKRGIKVMIDQVLSHTSAEHEWFKESRQSRDNPKADWYVWADPNEDGTPPNNWLAIFGGSAWEWDSRRGQYYLHNFLKSQPDLNFHCEDVQNQILQEVEFWLKRGVDGLRLDAINFCFHDKQLRNNPPKSASERKARGFSEDNPYAFQWHTYNNTQPENLAFLQRLRSLMDKYPNTVTLGEISSDDSLATMAEYTADNDKLHMAYSFELLADEFSAAYIRETVGTLESRLNDGWPCWSIGNHDVPRVASRWGKEDACDALSIVLNAMLLSLRGSVCCYQGEELGLKEAELTFEQLQDPYGITFWPKFKGRDGCRTPMPWDSQQHAGFSNGAPWLPVADDHKAKNVTVQQQADLSVLQAYKQFIAWRKTQPEILYGDIAFLSSHESTLAFTRSYEGSTLFAAFNLSNTEQVVNLPAGEWTALEGHGLSAAVSATQITLPPFGGFFAKQASNS

SEQ ID NO: 253 - DNA, 1671 bp, Oenococcus oeni PSU-1
  CDS (1)..(1671)
atgtcaaaaaaacaatggtttaaagatacagtagtttatcaagtatacccaatgagtttccaggatagcgataacgatggaattggcgacctgccggggattacaaaacgacttgactatatcaaaaaactaggtgccgatgtcatttggttaaacccgatttatgagtcacccaacaaagacaacggatatgatattgccaattatcgagctatcaacccggagtacggatcgatgaatgattttgatgatttacttaacaaagctcaccaattaaaccttaaaattatgatggatctagtcgttaaccatacttccgatcaacatcattggttccaggaaagtaaaaaaaccaaagacaatccgttttccgatttttatatttggagagatccggtagatggtcacgaacctaataattggttggccgcatttggtggttcagcatggacttatgttccggaacgcaaacaatattatttgcatttgtttgcaaccggtcaaccggatctcaattgggagaatccggatgttcgccaagcagtctttgatatagaacgtttttggctcgataaaggggttgatggttttagaatggacgttattaatcttatttcaaaaccaaagggtctgcctgatgttccggaacctgccaccgcaggaaagacgatggatttcgtagcggatgggcatcgcctaaatgagtttttgagtcaaatgaacagcgaagtattgtccaaatatgacactataacggttggtgaaatgcctggatcaactactgaagacgctattaaatacacgggccttaacagccatgaactgaatatggtatttcagtttgagcatgtcggtttaagtcccaatccggatgttagattgggaaagtggaatgaccagcctgttaaactgactgaattaaaagcctcgttgaacagatggcaaactggtcttgacggcaaaggatggaacagcctttactggaacaatcacgatcaacctcgggcagtatcccgttttggaaatgacgatcctaagtatcgtgttctatcggccaaaatgctggctacaactcttcacttgatgcagggcactccttatgtatatcagggtgaggagcttggaatgacaaatgctcacttcacaaaattaaatcaatacgaggatatcgaatctattaatttttatcatgagttggtcgaacaagaaaaaattgtcgatgggccaacaatgctaaaatatctggcaaatatttcacgtgataatgcccgtacgccaatgcaatggaacgataaaaacaatgccggattctcaagtgcaaaaccatggtttgcccttaaccctaattacaaatcaattaacgttgaggattcattggctgacaaaaattccgtattctattattatcaaaaattaattaagcttcgtcacaataatgaaataatcaaatatggaagcttcgaggaaatagaccccgatgacgatcaagtatacgcatatcgtcgtcattacgaaggaaaaactttgttacttataagcaattttaccgataaaatcgtaagtcgcgattacggtcaatcgaacgcttcaagtttgcttatagataattatgaagatgataaagtaaacgagttaagaccgtatgaggcgaaagcttatctatttaaatga

SEQ ID NO: 254 - protein, 556 aa, Oenococcus oeni PSU-1
MSKKQWFKDTVVYQVYPMSFQDSDNDGIGDLPGITKRLDYIKKLGADVIWLNPIYESPNKDNGYDIANYRAINPEYGSMNDFDDLLNKAHQLNLKIMMDLVVNHTSDQHHWFQESKKTKDNPFSDFYIWRDPVDGHEPNNWLAAFGGSAWTYVPERKQYYLHLFATGQPDLNWENPDVRQAVFDIERFWLDKGVDGFRMDVINLISKPKGLPDVPEPATAGKTMDFVADGHRLNEFLSQMNSEVLSKYDTITVGEMPGSTTEDAIKYTGLNSHELNMVFQFEHVGLSPNPDVRLGKWNDQPVKLTELKASLNRWQTGLDGKGWNSLYWNNHDQPRAVSRFGNDDPKYRVLSAKMLATTLHLMQGTPYVYQGEELGMTNAHFTKLNQYEDIESINFYHELVEQEKIVDGPTMLKYLANISRDNARTPMQWNDKNNAGFSSAKPWFALNPNYKSINVEDSLADKNSVFYYYQKLIKLRHNNEIIKYGSFEEIDPDDDQVYAYRRHYEGKTLLLISNFTDKIVSRDYGQSNASSLLIDNYEDDKVNELRPYEAKAYLFK

SEQ ID NO: 255 - DNA, 1482 bp, Trichodesmium erythraeum IMS101
  CDS (1)..(1482)
atgcaaattcaaacaccagaatgggttaaacaggctgtattttaccaaatttttccagatcgttttgctaaagctcaaccaacgactgaaactggaaaaggaatagacaaaggttggtatcccagcagtctagaaccttgggatgaatatcctactcctcaaggttataaaggagggaacctctggggtgtcattaaaaaacttgactatcttcaggaacttggtatcacagctatttactttacaccaatttttcagtcaacctgtaaccaccgctatcatactcatgactattatcgagtcgatccaattttaggaggtaatgaggctttaagggtattaatagatactgctcacgatcgcaatattaaagtggttcttgatggagttttcaaccacgctagccggggtttttatttctttaacgatatcctggaaaacggtccttattctccctggttgcattggttcaaaatagaaaattggcctctgtctgcttacgatggtagtttacctgctaattatgtgggttggttagataaccgtgctttacctgtttttaatcatgacaacccagaggtcaaagaatacattatggaaattggagaatattggttaaaatttggtattgatggttggcggttggatgtaccttttgaagtgaagactcccgggttttggcaagaatttcgcgatcgcgttaaggctattaacccagaagcatatattgtgggtgaagtctggagtaactgcgcacaatggttggatggtactcagtttgatggagtgatgaattacttatttactggtccaactattgcttttactgtaggcgatcgtgtggatcttgagcaaattgaaggccgtgactatgtagcttatccggctatatctgctgttgaatacggtcaaaaaatgcaggagttactgcaactttacccttgggaaattcaattaactcaactcaatttattagatagtcatgatacagctagagttttgagtattgctaaaggggataaagcaagtgttgaattagcgactctgttgttaatgacttttcccggagcaccaagtatttattatggtgatgaggtaggtttaccgggtaagtttgaccctgactgtcgtcgtagttttcctactactgaaaaatgggatcgtgaagttctggaatatcataaacagttaattgctattagaaaagaatattcagctttgcgcactggtaattacgaagtgttgtttgccgagggaaatgtttatatttttgctcgtattttagaagaggaagaaattattgtagctgttaacattggtatagaagcagcaaaagtaaatgttatttttaataagcttaaatctcaacctaataaagttgtttatggtagttgtaaaatttcctggcaaggaggagatgaagctagtaaattagagttatatttgccaggaagaaaaggttgtattttggttaaagattaa

SEQ ID NO: 256 - protein, 493 aa, Trichodesmium erythraeum IMS101
MQIQTPEWVKQAVFYQIFPDRFAKAQPTTETGKGIDKGWYPSSLEPWDEYPTPQGYKGGNLWGVIKKLDYLQELGITAIYFTPIFQSTCNHRYHTHDYYRVDPILGGNEALRVLIDTAHDRNIKVVLDGVFNHASRGFYFFNDILENGPYSPWLHWFKIENWPLSAYDGSLPANYVGWLDNRALPVFNHDNPEVKEYIMEIGEYWLKFGIDGWRLDVPFEVKTPGFWQEFRDRVKAINPEAYIVGEVWSNCAQWLDGTQFDGVMNYLFTGPTIAFTVGDRVDLEQIEGRDYVAYPAISAVEYGQKMQELLQLYPWEIQLTQLNLLDSHDTARVLSIAKGDKASVELATLLLMTFPGAPSIYYGDEVGLPGKFDPDCRRSFPTTEKWDREVLEYHKQLIAIRKEYSALRTGNYEVLFAEGNVYIFARILEEEEIIVAVNIGIEAAKVNVIFNKLKSQPNKVVYGSCKISWQGGDEASKLELYLPGRKGCILVKD

SEQ ID NO: 257 - DNA, 3288 bp, Thiobacillus denitrificans ATCC 25259
  CDS (1)..(3288)
atggaagaaaatgacccgctctggtacaaggacgcaattgtctacgaactgcacgtcaaggcgttcttcgacgccaacggcgatggcgcgggcgacttccggggcctgatcagcaagctcgactatctccaggaactcggcgtcaacgcgctctggctgttgccgttctacccgtctccgggccgcgacgacggctacgacatctcggattaccacaacctccacccctcgttcggcgacatggccgacttccgcaggttcatccgcgaagcgcaccagcgcggactgcgtgtcatcaccgagctcgtcgtcaaccacacctccgaccagcatccgtggttccaggcggcgcggcgcgcgccgcctggttcggtcaagcgcaactattacgtgtggagcgataccgacacgcgcttcagcgaaacgcgcatcatcttttcggataccgagaaatcgaactgggcgtgggatgaagtcgcgcaggcctactactggcatcgcttcttctcccaccagcccgatctcaacttcaacaacccgcacgtcttcaaggccatcatgcgcacgatgcgcttctggttcgatgcgggcgtcgatggcatgcggctcgacgccgttccctacctgtgcgagcgcgacggcacgagcaacgaaaatctgcccgagacgcacgcggtcatccgaaggatgcgcgccgaactcgacgcgcgctacagcaaccgcatgttcctcgccgaagccaaccagtggcccgaggacgtgcgcgagtatttcggcaacggcgacgagtgccacatggcctaccacttcccgctgatgccgcgcatgtacatggcgatcgcgcaggaggatcgccacccgatcgtcgaaatcatggaacagacaccggacatccccgacctttgccagtgggccgtgtttctgcgcaaccatgacgaactgacgctcgagatggtgaccgaccgcgaacgcgactatctctatcaggcctacgcgagcgacccgcaggcccgcctcaatctcggcatccgccgccgcctggcgcccttgctcgacaacgaccgccaccgcatcgagttgatgaatctgctgctgatgacgatgccgggctcgccgatcgtctattacggcgacgagatcggcatgggcgacaacctcctgctcggcgaccgcaacggcgtgcgcacgccgatgcaatgggacggcggccccaacggcggattctcgtccgcgccgaccgagcgtctgttcctgccgccgatcaccgatccggtctacggctacggcgcggtaaacgtcgaggcgcagcagcgcaatccctcgtcgctgctgaactggacccggcggctgatcgcaatgcgcaaggcgcaccgcgcgctcggtcgcggcacgctgcgcttcctgcggcctggcaaccgcaaggtgctcgcctatctccgcgaatacgagggcgagacgattctgtgcgtggccaacgtcgcgcgtgcgccgcaggccgtcgaactcgatctctcgcccttcaagggacacgtgccggtcgaactgatggggcgcagcagcttcccgccgatcggcgagttgccctatctgctgacgctcggcggatacggctgtttcgtgttccggctcgcgaccgacgtcgaggcgccggcctggcacgaagaaaggccggtgccgcccgatctgcccgtgctcgttttggtcgacgcgggctggcgcacgctcttcgcgcggaccgacgaaggcgtgaaccagctcatggtgcggcgtgcacgcgagcagctcgagcgccagatcattccgcgctacttccggacgcagccgtggttcgtctacagcgaggccgcgctcgagaaattcgagttcgggaccttgcgcgagtgggggaccgacagcggaacctggctgctcgcgaccgtcaccgtcacgctcctcgacggcagcatttatcactacgcgctgccgctgggcctcgcctgggaagacgaagacgaaggccgcgtcgccgccctgctgcacgtgacgctcgccaaggtgcggcggctggcgcgggtcggcatcctgttcgacgccttctgggacgacggcttctgttgcgcgatcgtctccgccatggagcgcggcgagacgcttgcctacggcgacggccacctgacgttccgcacggccagcgcctaccccggattcttctgtccgcttgtcacgtcgtcgatcacccgtacggtctccgaacacgggcgtctgcgcgtgaatctcaacgaccagctggtcctgaaaagctatccgcgacaaatgcagggcacgcatcccgagctcgagatgtcccggttcctcaccgagaccgcgaagtttgcgcacatcccgcaactcggcggcacggtcgaatacgtcgcgagcagcggcaggcactccacgctcgcgatcctcgagcgctatgcgcccaaccagggcgacgcctgggcctacacgctcaactacctcgaacgttttctcgatctcagccgcacgacgggcgagcaggcgcccgacggccggcacggtcgctacatggggctgatgaagacgctcggcgagcgcacggccgagttccatcgcgcgctcgcgaccccggatcgctcgggcgacttcggcagcgagccgatcgcgccgccggatattctggagtgggtcaacaaggtacggcacgagatgggcgtgatgtacgagctgctcgaacgtgccttgccggctttgccggagcccgtggccgtcgccgcgcagcagctttttctcgttcgccccaagctctaccggcgcgtcatccgcgcctcgcgcgtgcgtgtcgacgcgagcaagacgcgctgccacggaaactatcacctcggtcaggtctggctcgtgcaaaacgatttcctgatcgcgaattacggcggcatacccggccgcagctgggaagaacgccgcgcaaagcacgcgccgctgcgcgacgtcgctagcatgctgctttcgctgtcgcaggcgggcgcggccgcgctcgcgcgtgtcgccggcgactccgtcgatgtgatggcggccctgcagccccatgtcgacgcatgggagctggcggcgcgcaaggcgttctaccgcggttaccgcaagggcatggacggtcatgccgcgtacccgacggacgcgaccgcggccgaggccttgctgactttgttcctggctgaaaaagcgattgcggagctgaccgaggcgctcgaacgccgcgccgtcggcagcgctgctgcaatgcgtcggctggttcaggtgacacgccgttga

SEQ ID NO: 258 - protein, 1095 aa, Thiobacillus denitrificans ATCC 25259
MEENDPLWYKDAIVYELHVKAFFDANGDGAGDFRGLISKLDYLQELGVNALWLLPFYPSPGRDDGYDISDYHNLHPSFGDMADFRRFIREAHQRGLRVITELVVNHTSDQHPWFQAARRAPPGSVKRNYYVWSDTDTRFSETRIIFSDTEKSNWAWDEVAQAYYWHRFFSHQPDLNFNNPHVFKAIMRTMRFWFDAGVDGMRLDAVPYLCERDGTSNENLPETHAVIRRMRAELDARYSNRMFLAEANQWPEDVREYFGNGDECHMAYHFPLMPRMYMAIAQEDRHPIVEIMEQTPDIPDLCQWAVFLRNHDELTLEMVTDRERDYLYQAYASDPQARLNLGIRRRLAPLLDNDRHRIELMNLLLMTMPGSPIVYYGDEIGMGDNLLLGDRNGVRTPMQWDGGPNGGFSSAPTERLFLPPITDPVYGYGAVNVEAQQRNPSSLLNWTRRLIAMRKAHRALGRGTLRFLRPGNRKVLAYLREYEGETILCVANVARAPQAVELDLSPFKGHVPVELMGRSSFPPIGELPYLLTLGGYGCFVFRLATDVEAPAWHEERPVPPDLPVLVLVDAGWRTLFARTDEGVNQLMVRRAREQLERQIIPRYFRTQPWFVYSEAALEKFEFGTLREWGTDSGTWLLATVTVTLLDGSIYHYALPLGLAWEDEDEGRVAALLHVTLAKVRRLARVGILFDAFWDDGFCCAIVSAMERGETLAYGDGHLTFRTASAYPGFFCPLVTSSITRTVSEHGRLRVNLNDQLVLKSYPRQMQGTHPELEMSRFLTETAKFAHIPQLGGTVEYVASSGRHSTLAILERYAPNQGDAWAYTLNYLERFLDLSRTTGEQAPDGRHGRYMGLMKTLGERTAEFHRALATPDRSGDFGSEPIAPPDILEWVNKVRHEMGVMYELLERALPALPEPVAVAAQQLFLVRPKLYRRVIRASRVRVDASKTRCHGNYHLGQVWLVQNDFLIANYGGIPGRSWEERRAKHAPLRDVASMLLSLSQAGAAALARVAGDSVDVMAALQPHVDAWELAARKAFYRGYRKGMDGHAAYPTDATAAEALLTLFLAEKAIAELTEALERRAVGSAAAMRRLVQVTRR

SEQ ID NO: 259 - DNA, 1815 bp, Chloroflexus aurantiacus
  CDS (1)..(1815)
atgtatctgcgcttcagtggcagaccaggtgacacagcggtatttcggctccgtatggccgcagacgcaccggtcagtggggtcttcctccgcacctgcccggatggggaacagcattttacgccactgcgcgatctgggagtgcgcggggtgtgccggtggtgggaaggtgagctaccgatccgcatgctccgcaccaattaccgcttcctgatccgcgcagatgactgttcgcgctggtacagcgctggtggcatcacccgtcactaccccaccgacgcaaatgatttcgtggtactggccaactatcacgcgccagcctgggtacgtgatgcggtcttctaccagatttttccggatcggtttgccgatggcgacccgacgaataatgtccgcgatggtgcgtatctctaccacggacgaccggttgttgcgcgccgctgggatgaacgacccaaccgggcgaccggatcgatagagttctacggtggcgatttgcaagggatcgcgcagcgcatcgactatctgaccgatctgggagtctcggcactgtatctcaatcctatcttccgagcaccatcgaaccacaaatacgatgtcgaagactataccagcattgatccacacctgggaggtgaagcagggttactccgcttacgtgaggtactcgacgagcgagccatgaagctggtgcttgacatcgtaccgaaccattgtggagtgacccatccgtggtttgtcgctgcccaggccaacccacgagcaccaacagccgagttcttcatgttccgtcgtcatcccgacgactacgagagctggctgggggtcaagaccctgcccaaactcaattaccgcagtgtccgcctccgcgacgtgatgtacgcaggccaggatgcgattatgcgctactggttacgaccaccctatcggatcgacggctggcggattgatgttgccaatatgctggggcggttggggacagacaaccttggccacaagattggacgcgggatttggcgggcagtgaaggcagagcaaccggaagcctatctgctgggtgaacacttcttcgacggtactccccatctgcaaggtgaagagcttgatgccacaatgaattatcaaggcttcacctttcccatctggcgctggttgggagggtttgagttcaatccgcagcggcctgaagccgatccacgaccgattgcaaccgagacggtcgttgcgcaatggacggcatttcgggcagcgataccgtggcagatcgccagtcagcaattcaacctgttgggaagtcatgacaccccgcgtctacggacaatcgtaggcgatgatctggcgcgagtgcgggtagcgatgacgttactcttctgctatccgggggtgccgtgtatctactacggtgacgaaattggactgacgggcggcggtgatcctgattgtcggcgaccgatgccgtgggatgaacgagagtgggatcacgacctgcgggcgttcgtgcaacggctggcacgcttacggcgtcagtcgccggcgttgcgctggggcggctttcagcagctctacgcaaacggggaaacgattgccttccagcgcgaagcacctgaggagcgcatgatcattgtggtacggcgcagtgatgatgggcaacgcctgctgccggtgcgtcacggcgggctggctgatggggttcacctgcgggaactcttcagtggtgccgagacggttgtacgcaacgggatgctggacattgggaatttgccggccaccggtgcgcaaatctggcaaaccacagacaaagacaacgtgttctga

SEQ ID NO: 260 - protein, 604 aa, Chloroflexus aurantiacus
MYLRFSGRPGDTAVFRLRMAADAPVSGVFLRTCPDGEQHFTPLRDLGVRGVCRWWEGELPIRMLRTNYRFLIRADDCSRWYSAGGITRHYPTDANDFVVLANYHAPAWVRDAVFYQIFPDRFADGDPTNNVRDGAYLYHGRPVVARRWDERPNRATGSIEFYGGDLQGIAQRIDYLTDLGVSALYLNPIFRAPSNHKYDVEDYTSIDPHLGGEAGLLRLREVLDERAMKLVLDIVPNHCGVTHPWFVAAQANPRAPTAEFFMFRRHPDDYESWLGVKTLPKLNYRSVRLRDVMYAGQDAIMRYWLRPPYRIDGWRIDVANMLGRLGTDNLGHKIGRGIWRAVKAEQPEAYLLGEHFFDGTPHLQGEELDATMNYQGFTFPIWRWLGGFEFNPQRPEADPRPIATETVVAQWTAFRAAIPWQIASQQFNLLGSHDTPRLRTIVGDDLARVRVAMTLLFCYPGVPCIYYGDEIGLTGGGDPDCRRPMPWDEREWDHDLRAFVQRLARLRRQSPALRWGGFQQLYANGETIAFQREAPEERMIIVVRRSDDGQRLLPVRHGGLADGVHLRELFSGAETVVRNGMLDIGNLPATGAQIWQTTDKDNVF

SEQ ID NO: 261 - DNA, 4140 bp, Chloroflexus aurantiacus
  CDS (1)..(4140)
atgtttctccgcctgatgcacctcatccttgcgattggggtgctctttggtgcaacgattgcaccactctcctcggttgcgttcgccgatcacacgccattaccagcgtcagttaacctggcaggtgatttacagtcggaagcgaccggcggcgcctgtggcgattgggatccgggatgtgccgcagcggccttcagcgctcagggtaacggtgtctatctgttcgtctcgcagacgattccagcagggagctacgaatacaagatcgcaatggggagctgggctgaaaactatggggctaattttcagcagaatggccccaacatcccggtgacgctcggcagtgcacagagtgtacggttctactacgatcacaaaacccattatatcgccgacagcgtgcgtaacactatctacaccgtaccgggtaacttcaacgacgagatcgggtgcagtggtgactggcaaccagattgtctgcgcacgttcatgagtgatgttgatggtgatggtgtctttacatttgccactgacgccattccacccggcaattatgagttcaagattgccacaaatgagagctgggcaaacccaaattatggcgcatttgggaacaatgttccctttacagttaccggcccggcaaccgtcatttttagcttcaatacggcaactacgtatgttggtgtggaagtacgtagtgcactcccgcagcctgacaacaatgtggagtgggacggcgtttaccacaactcgcgcgatcctctttatcgcacgccgggaggtgctgtacctgccggtacaccggtgacaattcggctccgcaccttccacaatgatgtcacggcggtaaccctgcgggtgtacgatgtcaatgccggggcacagcggttcattccgatgagtgtcgtcgctgccaataccgactgttacggcgattatgggccacgtcggtgcgatttctgggcggctacgctgaatgaggcgcaaccgaacaacctctggtaccgctttattgtcaccgatggcagtgataccgactattacgccgataacaccgcagcgctcgatggcggcagcggacgtatgacggatgatgtcgttgacttcagttatgccttgatgttctacgatccggcattcacctcgccaaactgggcacgaacggcagtcatctaccagattttccctgatcgttttcgcaatggcgatccgcataacgatccgcaagacggtgacatccggtacgatgatccggtgattacgttgggttggggtgaattacctgaaggctattgccgtcactatgccgacgcaaccaccaattgtccgtggcggtttgacacgaccccaccggcctggagtccaactatcgaagggccacggggacgtgattactacggcggtgatttggccggcgtgatcgagcaacttgactacctccagcaattgggcatcacgaccatctacttcaatcccatctttgccgccggatcgaaccatcgctacgatacccgtgattactatcgcatcgatccctatcttggcaataacggcacctttgcgcacctggttcaggaggcgcggcggcgtgggatgcgagtgatcctcgatagcgtcttcaatcacatgtcgtcggatagccccttcttcgaccgctatagccattacacgaccctgggtgcctgcgagtcactggcctcgccatatcgcacctggttcaacttccgcacgaataatgttccgtgtacgagcgacgattatgtcggctggtttggcttcgactccatccccgaaatcaacaaatcaaacccggatgtgcagagctacttcttaaccggagccaacagtgtgacacgcttctggctacgacgcggtgccgccggttggcgcctggatgtgatgggagatgccagcttcccggcaggctattgggagacattccgcaccgtcgtgcgccagaccaaacgagacggtctgattattggtgagttgtggcagaaggactcaacattgctgcgccacctccgtgggcagactgccgatacaacgatgaactaccgtctgcgtgatgcggtgatcggcttgctcctgcctgggggaacgtttgacagcaaagggtttggtgacagtggccgggtcatcagtccatcagaattcttgagtcgactggcctcgatccgtgaagactacccggatgcagcctactacacgctcatgaatctgctcggcagccacgatacggagcggattctgtggacgcttacgcctggacaggagacacgcgccgataaggaattcaatgccgctaatctggcagaaggtaagcggcgtgtccaactggcctctctgatccaattcaccgtacccggtgcaccgaccgtgtattacggcgatgaagtaggagtcaccggcgatgatgatccagatgaccgccgcacctatccctggcctgatcagggtggtacacccgacaccaaccttctgaaccattaccgcagcctgaccgagctgcgcaaccgttatccggtgctggcgaagggtgatttcacaccgctgctggccgacgatgccgcaggcgttgtggcctatggtcgaaagtatcgcaataaagccgcgttggtgctgatcaatcgcagctcaacaacgcagacgatcacggtacccgtacagggctttctgcccaatggggtagaactctgcgcgctgtttaccgttggcaatcagctcgacgagacggtacaggtcgtgaacgggagcatccagatcacgctgaacccgctgagcggtacggtgctgatcagcgagccgggagccgatctcacgccaccggcggcccccaccaacctccaggtcaccgaagagggtgatcggtcggtaagcctgagctggcagcggcccagtggtggagcacaggcgtacaacatctaccgcagcccggttagtggcggtggttgggtcaaggtcaatactgcgccggtaagcggtctgagctttaccgacaccacggtagagaacgggcgaacctactacttcgttgtccgtgcgcttgacgccgtcgggaacgaagggccagcttcggcggaagtgagcgctctgccgcactaccggattgggtgggccaatttgcaatggccaccggcgatctcacacaccgtgtcggccatcaacaccaccccggatatttacgggcaggtctggatcgacggtgtaaccagtcagcccggcgcgacacctggcctgcgtgctcaggtgggatacggcccgcagggcagtgatccccgtgggagcaactgggtgtgggtggaggctaccttcaacgttgatgccggcaacaacgacgaattcaaggcgcaactccagcccgaaacggttggcaccttcgattacgtcttccgctacagcaccaccaacggacgcgactggctctacgccgacagcagtgggccgttcagtggcttaccgccacaaccaggcgtactcaccgttctttccagtggtgacacaacaccgccggcagtcccaaccggcctgcaagtgatcagcgcgtccccggcaggaatcgtcttgagctggaatgccgtcggtgatgcctatgcctacgaagtacgccgtatcgatggcaacggcaatgaactcatctttgcccgtacaactgcaaccaccttcaccgacaccggtgtcatgcagggggcaacgtacacctatgacgtgcgttctttagacatctccttcaaccgttcagccttcagcgcaccggtaacggctaccgccgaactccgcacggttacgctggtgatgaatgtgacggtaccgaccccggttgaagacgcgattgggcgcagcgtctacattgccggcttccttgaccggctcgacggtggtttaccgcagtggaatccgggtggtgtggtgatgacgcaggtctcggcaacacagtggacaatcaccttcaccggacgcgagggcacgcaactcgaatacaagtacaccctcggatcgtgggactacgttgagaagggtgcgacttgtgaagagctggccaaccggcaattgacgctgacctacggtacgagtggcgtgcagacggtcaatgacactgtgctcaactggcgaaatgtagacccgtgtgggaattag

SEQ ID NO: 262 - protein, 1379 aa, Chloroflexus aurantiacus
MFLRLMHLILAIGVLFGATIAPLSSVAFADHTPLPASVNLAGDLQSEATGGACGDWDPGCAAAAFSAQGNGVYLFVSQTIPAGSYEYKIAMGSWAENYGANFQQNGPNIPVTLGSAQSVRFYYDHKTHYIADSVRNTIYTVPGNFNDEIGCSGDWQPDCLRTFMSDVDGDGVFTFATDAIPPGNYEFKIATNESWANPNYGAFGNNVPFTVTGPATVIFSFNTATTYVGVEVRSALPQPDNNVEWDGVYHNSRDPLYRTPGGAVPAGTPVTIRLRTFHNDVTAVTLRVYDVNAGAQRFIPMSVVAANTDCYGDYGPRRCDFWAATLNEAQPNNLWYRFIVTDGSDTDYYADNTAALDGGSGRMTDDVVDFSYALMFYDPAFTSPNWARTAVIYQIFPDRFRNGDPHNDPQDGDIRYDDPVITLGWGELPEGYCRHYADATTNCPWRFDTTPPAWSPTIEGPRGRDYYGGDLAGVIEQLDYLQQLGITTIYFNPIFAAGSNHRYDTRDYYRIDPYLGNNGTFAHLVQEARRRGMRVILDSVFNHMSSDSPFFDRYSHYTTLGACESLASPYRTWFNFRTNNVPCTSDDYVGWFGFDSIPEINKSNPDVQSYFLTGANSVTRFWLRRGAAGWRLDVMGDASFPAGYWETFRTVVRQTKRDGLIIGELWQKDSTLLRHLRGQTADTTMNYRLRDAVIGLLLPGGTFDSKGFGDSGRVISPSEFLSRLASIREDYPDAAYYTLMNLLGSHDTERILWTLTPGQETRADKEFNAANLAEGKRRVQLASLIQFTVPGAPTVYYGDEVGVTGDDDPDDRRTYPWPDQGGTPDTNLLNHYRSLTELRNRYPVLAKGDFTPLLADDAAGVVAYGRKYRNKAALVLINRSSTTQTITVPVQGFLPNGVELCALFTVGNQLDETVQVVNGSIQITLNPLSGTVLISEPGADLTPPAAPTNLQVTEEGDRSVSLSWQRPSGGAQAYNIYRSPVSGGGWVKVNTAPVSGLSFTDTTVENGRTYYFVVRALDAVGNEGPASAEVSALPHYRIGWANLQWPPAISHTVSAINTTPDIYGQVWIDGVTSQPGATPGLRAQVGYGPQGSDPRGSNWVWVEATFNVDAGNNDEFKAQLQPETVGTFDYVFRYSTTNGRDWLYADSSGPFSGLPPQPGVLTVLSSGDTTPPAVPTGLQVISASPAGIVLSWNAVGDAYAYEVRRIDGNGNELIFARTTATTFTDTGVMQGATYTYDVRSLDISFNRSAFSAPVTATAELRTVTLVMNVTVPTPVEDAIGRSVYIAGFLDRLDGGLPQWNPGGVVMTQVSATQWTITFTGREGTQLEYKYTLGSWDYVEKGATCEELANRQLTLTYGTSGVQTVNDTVLNWRNVDPCGN

SEQ ID NO: 263 - DNA, 3363 bp, Chloroflexus aurantiacus
  CDS (1)..(3363)
atgaaccgtgtacgcccggccaagacgccgactctgttagccgatgatccgctctggtacaaagatgcggtcatctacgaattgcacgtgcgcgctttttgcgatagcaatggtgatggtatcggagattttcccggtctgaccagcaagctcgactatctgcaagatttgggcgtaacggcaatctggctgctccccttctatccctcaccgctgcgcgatgatggctacgatatagccgattatacgaacattcatcccaattacggcacgctggccgattttaaggtgtttattcgcgaagcccatcggcgtgggctgcgcgtcatcaccgagcttgtctgtaaccacacctctgaccagcacccctggtttcaacgtgcccggcgggctaagcccggtacttcagcccgcaacttttatgtctggtcggatacacccgaccgctacaaggacgcccggatcatcttcaaagattttgagaccagtaactggacgtgggatccagtggcgcaggcgtactactggcaccgcttctacagccatcaacccgatctcaactttgaaaatccggctgtccagcgggctgtcttcaaggcgatggagttctggctcgatctgggagtcgatggcatgcgtctcgatgccatcccctacctctacgaagcagagggcaccaattgcgagaacctgccggaaacccacgcctttctcaaacgcttacgtaagcatatggacgaaaagtaccaggggcgtatgtttctcgccgaggccaatcaatggccagaagacgcggttgcctatttcggggatggcgatgagtgccatatggcctttcacttcccggtgatgccccgcctctttatgtcggttcaccttgagaatcgctatccgatcattgatattatgcggcaaacgccgccaatacccgacaattgccagtgggcaatctttctgcgcaatcacgatgaactgaccctcgaaatggtcaccgatgaagagcgcgactatatgtaccgggtctacgctcgcgatccccaggcccggattaatctcggcattcgccgacgactggcaccattgctcggcaaccatcgccgcaagatcgagttaatgaacggattgctcttctcgctgcccggtacgccggtgatctattacggtgatgagatcgggatgggcgataacatctacctcggcgaccgcaacggtgtgcgcacgccgatgcagtggagcggtgatcggaatgccggtttttcgcgggctaatcctcagcaactctatctgccggtaattaccgatccggagtatcactacgagacggtcaacgtcgagacgcaaagcgccaatcagcattcattgttatggtggacgaaacgcctgattgcactacggaagcgttacgccgcatttggccggggcacgctcgaatttctctatcccgaaaatcgtaaggtgctctgtttcctgcgcaaaaccgaggatcagattctcctggccgttttcaatctgtcgcggtttgttcagggtgtcgaactcgatctctcgccgtaccgtggcctgatgccggttgagctattcggtcaggtggaatttccaccgattggcgatcagccctatttcctgacccttggcccacacagcttctactggtttacgctaacaccgcaacggattgaaggagtacgcttgcccacaccccaacctgaaaccgaactggttgagattccggttgatgcgattgagtgggatgcgatcttctacgatggccggcaggcgcggcttgagcgagtcttacccgattacctgcgttatcggcgctggtttggggccaaaacacgcaagatcaaacaggtgcaggtaagcgagtttgcccgtctcgattatgccggtggcccagcctacctgacactgttgcaggtcacctatgttgaaggcgccccagaaacctacttgttgccgatggcgtatgccgaaggcgagcgcgccgaccagatactggccgatcaacgccacatggtgattgcccgcctacgggttggccgtcgacctgaagccggtatcctgtacgacccactcggtgagcgtcgctttgcgtcggcgctcctggaactgataatcggacgacgccgtctacggggtgaagccggtggagagctggtgggtggcacgacccgtgcgctccgcaagcttctcggcggtagtgatggcctggaaccgagtttgatgcgtggcgagcagagcaattcatcgatcaattttggtggtcggctcattatgaagctcttccgtaagatcgagctgggccgcaatcccgatctggaactgggacgtttcctgaccgaagaggttgggttcccccatacaccaccggtagccggctacattgaatatctgcgcggcaaagatgaaccgttgacgctggcaatcgttcagggctatgtgcagaacgaaggtgatgccttcgattacgcgctcgatgtcgtgcgccgctactatgatacggtgctcacccgtaccgatgtcgtgccaccggttgtgaaggcaagcgttgccggcatgctcgcggctgcgcatcagccaccgccagccctggttgaggaattgatcggtggttacctcgagtcggcacgcctgctcggtcagcggactgcggagatgcatcaggctctggccaaaggaagtggaccggcaatggcacctgaacccttctcgaccctctaccagcgctcaatctaccagagtattcggagtctgatcgggcaaaccctgcaagatttgcggaaactgctgccgtcgttgccggcaaccgttcgtccggcggcagagcgtgttacccagagtgaagaggcgctcctggcgcggttgcaacggattaccggtgacaagatcgagacggtgcgtattcgcattcacggtgactaccatctcgaacaggtgctcttcaccggcaaagattacatgattatcgacttcgagggtgaaccactgcgcccaatcagcgagcggcggatcaaacgctcaccgttgcgtgatgtggccggcatgttgcgctcataccagtatgtcgcctatgccgctctatatgcccataatggtgcaagcagaagcgctgaagagatcgagcgacttcagcgctgggctgatatgtggagtttctgggtctgtgcagcctttcttaatggctatctgaccacagccggccatgaagcattcgtcccccaggatcaggccgatctcgaagccctgctcgagacgtttgtcgtcgaaaaagccgtctacgaactgggttacgagatgaacaatcgccctgactggctgccgatcccgatcaacggcatcttacgccagattgaagaatga

SEQ ID NO: 264 - protein, 1120 aa, Chloroflexus aurantiacus
MNRVRPAKTPTLLADDPLWYKDAVIYELHVRAFCDSNGDGIGDFPGLTSKLDYLQDLGVTAIWLLPFYPSPLRDDGYDIADYTNIHPNYGTLADFKVFIREAHRRGLRVITELVCNHTSDQHPWFQRARRAKPGTSARNFYVWSDTPDRYKDARIIFKDFETSNWTWDPVAQAYYWHRFYSHQPDLNFENPAVQRAVFKAMEFWLDLGVDGMRLDAIPYLYEAEGTNCENLPETHAFLKRLRKHMDEKYQGRMFLAEANQWPEDAVAYFGDGDECHMAFHFPVMPRLFMSVHLENRYPIIDIMRQTPPIPDNCQWAIFLRNHDELTLEMVTDEERDYMYRVYARDPQARINLGIRRRLAPLLGNHRRKIELMNGLLFSLPGTPVIYYGDEIGMGDNIYLGDRNGVRTPMQWSGDRNAGFSRANPQQLYLPVITDPEYHYETVNVETQSANQHSLLWWTKRLIALRKRYAAFGRGTLEFLYPENRKVLCFLRKTEDQILLAVFNLSRFVQGVELDLSPYRGLMPVELFGQVEFPPIGDQPYFLTLGPHSFYWFTLTPQRIEGVRLPTPQPETELVEIPVDAIEWDAIFYDGRQARLERVLPDYLRYRRWFGAKTRKIKQVQVSEFARLDYAGGPAYLTLLQVTYVEGAPETYLLPMAYAEGERADQILADQRHMVIARLRVGRRPEAGILYDPLGERRFASALLELIIGRRRLRGEAGGELVGGTTRALRKLLGGSDGLEPSLMRGEQSNSSINFGGRLIMKLFRKIELGRNPDLELGRFLTEEVGFPHTPPVAGYIEYLRGKDEPLTLAIVQGYVQNEGDAFDYALDVVRRYYDTVLTRTDVVPPVVKASVAGMLAAAHQPPPALVEELIGGYLESARLLGQRTAEMHQALAKGSGPAMAPEPFSTLYQRSIYQSIRSLIGQTLQDLRKLLPSLPATVRPAAERVTQSEEALLARLQRITGDKIETVRIRIHGDYHLEQVLFTGKDYMIIDFEGEPLRPISERRIKRSPLRDVAGMLRSYQYVAYAALYAHNGASRSAEEIERLQRWADMWSFWVCAAFLNGYLTTAGHEAFVPQDQADLEALLETFVVEKAVYELGYEMNNRPDWLPIPINGILRQIEE

SEQ ID NO: 265 - DNA, 1803 bp, Lactococcus lactis subsp. cremoris SK11
  CDS (1)..(1803)
atgtattactataatccatggaatttagattataagcaaccttttggtgcagtaaaagtagggcaagccattttattgaaatttgacgcaaatcaaactcaagtagaagtgaagtgcattattcgacgtgattttggaaaaagatatgaattccttatgagcagagatgagtcaggtttttttacagtcactatcccatttgatgaaaatgctggtctttatttttactattttgaaattttggagggctcagattgggaacaaaacaagcgtttttatgggagttctggaataggtggggaagggctgctctatactaacgaaaatgatattaaaccctatcagctgacagtttttgaaaaagaggacaaggcaccagcttggtatcgtgacgctgttttttaccagatttttcctgatcgtttccataatggaaatgaaaatgggcaagtcagccatccaaaaccgaattcttttatttatggaactaaatctgatacccctttttatgtgaaagaggaaaatggtgatattgctcgttgggatttctttggtggaaacctaagaggaatcattaacaaaatttcatatttaaaagaacttggaatcaatgccatttatcttaatccagttttttctgggacaagtaaccatcgttatgacaccaacgattatctaaaaatagattccatgttaggaactcaagaagattttcaagaattaatcaatttacttcatcaagaacaaatgcatttagttttggacggtgtcttttcacatgtaggtaaaaattcactttacttcaatatcaatggagattatggagatgatgaaggagcggcgaaaaatcctgactctccttattttgactggttcaagtttgaaaattatccttttgattataaatcttggtggggaattaaagatttacctgaaattgataaagataatgaatcctttcgtgattttatttatggtaggaaaaactctgttttatcaaagtggaatgacttgggaatagatggttggcgattagatgttgctgatgaattgcctgattcatttattaaagggattcgtgagaatcttgaccgttattcagaaaaaattctaataggagaaatttgggaggatgcttctaataagatttcttatggaacaagacgcaaatatattcttggcgggagcttacaggcttgtatgaactatccgtttcgtgatttaatcatcaatttattaaacggaaatcgctcatgtcaggatgtagctcatcaattgatgactttgcaggaaaactatcccaaagatattttttataacaacttaaataatttggggacccatgatacggaacgtattttaacaatggtcggaaaagaaaatctgccattagctgtttcactcttatttgttttaccaggaatcccttgtatttattatggtgacgaagcgggactttctggaggaaaggatccagaaaatcgtaaatattttccttgggatgatatttcaccagaaatatatgattattataagagttggacgaaaaagcgtctattagaaaatagtttgaaagaaggagaattttctagcttttatagtgacagactactaggaattttgcgctatacagattcagaagtttttgtcgaggtgattaatcccagtgaagatgaaatcaagatagattattcagaaattacttttttacaaaagtttgattttatgccaaaactaaaagatttactgacagagcaagtgattagtggaaaatcaaacatagatttgaaaatagaaagataa

SEQ ID NO: 266 - protein, 600 aa, Lactococcus lactis subsp. cremoris SK11
MYYYNPWNLDYKQPFGAVKVGQAILLKFDANQTQVEVKCIIRRDFGKRYEFLMSRDESGFFTVTIPFDENAGLYFYYFEILEGSDWEQNKRFYGSSGIGGEGLLYTNENDIKPYQLTVFEKEDKAPAWYRDAVFYQIFPDRFHNGNENGQVSHPKPNSFIYGTKSDTPFYVKEENGDIARWDFFGGNLRGIINKISYLKELGINAIYLNPVFSGTSNHRYDTNDYLKIDSMLGTQEDFQELINLLHQEQMHLVLDGVFSHVGKNSLYFNINGDYGDDEGAAKNPDSPYFDWFKFENYPFDYKSWWGIKDLPEIDKDNESFRDFIYGRKNSVLSKWNDLGIDGWRLDVADELPDSFIKGIRENLDRYSEKILIGEIWEDASNKISYGTRRKYILGGSLQACMNYPFRDLIINLLNGNRSCQDVAHQLMTLQENYPKDIFYNNLNNLGTHDTERILTMVGKENLPLAVSLLFVLPGIPCIYYGDEAGLSGGKDPENRKYFPWDDISPEIYDYYKSWTKKRLLENSLKEGEFSSFYSDRLLGILRYTDSEVFVEVINPSEDEIKIDYSEITFLQKFDFMPKLKDLLTEQVISGKSNIDLKIER

SEQ ID NO: 267 - DNA, 1755 bp, Lactococcus lactis subsp. cremoris SK11
  CDS (1)..(1755)
atgaacaaagctgcaatttatcatcgtcctgagtcggaatttgcttatctttatgcaaaaaatctgatgcatgttcgtcttcaaacacaaaagtctgatgtggaaaaagtcgaattattttatggcgatccttattcgtgggaagggcttgacaaccctgaaacacagtattgggctagtcaaaaagtagagatgaaaaagtatctttctactaatattagcgattattttgaggccgaaattactgttgcaacgaaacgagttgattacttatttgtcattacaggtttggatggagaaaaagtagtttacacagaccaaggaatgtttgattatgatgagagcttggtgactaaaaaatatggggctttccgtttgccttatttccatgaaagtgatcgttttaaagcacctgaatgggtcaaagaaacggtttggtatcaaattttccctgaacgttttgccaatggggatacaagcaatgaccctgaaggaacgaaagcttggaatacccaagatgttcccgaccgtcaagatttttatgggggagatttgcaaggggtgattgatcatctggaacatttgactgaacttggtgtgaatggtatttactttacccctattttccaagctttttctaatcataaatatgatacagaagattatatggaaattgataagcaatttggggataaggaattgtttaaaactttggtgaaagaagcacatgcgcgtggtattaaagtcatgttagatgcggtctttaatcacatcggagatacgtctgctcaatggcaagatgtattgaaaaatcaagaaaaatcaaaatttgcggattggttccatgttaatagttggccagcaacttatactccgactgatgattttgaaaatgctgagaatgcaacttatgatacttttgcctttactccacacatgccaaaactgaatacggctaacccagaggttgaagcttatcttttgaaagtagctgattattggatttctgagtttgatattgatgcatggcgtttggatgtggcggatgaagtggatcatactttctggaaaaaattccgcacaacttgtgatgcggaaaaagatgatttttatattttaggtgaggtttggcattctgcacaaccttggttagttggtgacgaattctctgccgttatgaactatgcttatactgatgcgattaaagatggtttgattacgaagaagatttctttggaacaaatggtttctaatattaatacgcaactgacattataccgtaagcaagtgaatcaactgatgtttaatgttttagattctcatgatacacccagaattttgactgttgcaaaaaataataaaaatttgatgaaattggtggaaacgttcaccttcatgcaaccaggtgtgccttgtatttattatggagatgagtatgcgttgacaggtggaatggatcctgagtgtcgtaaggtgatgccttgggaagaaaaagatcaagatttagagatgtttgacttctttaaaaatctgattgctctacgcaaacaatatcaaggaattttaagtgattcagaagtagaatggaaaatcgtagattcagaaaatggcattgtgaaatttgaacgtggatctttgaaagctattttcaatattggcgaaaaaccggcttatttttcggctgatgaagtgattttctctaatttggttgaccaaaataatattttacaatatggttttgtaatctataaatag

SEQ ID NO: 268 - protein, 584 aa, Lactococcus lactis subsp. cremoris SK11
MNKAAIYHRPESEFAYLYAKNLMHVRLQTQKSDVEKVELFYGDPYSWEGLDNPETQYWASQKVEMKKYLSTNISDYFEAEITVATKRVDYLFVITGLDGEKVVYTDQGMFDYDESLVTKKYGAFRLPYFHESDRFKAPEWVKETVWYQIFPERFANGDTSNDPEGTKAWNTQDVPDRQDFYGGDLQGVIDHLEHLTELGVNGIYFTPIFQAFSNHKYDTEDYMEIDKQFGDKELFKTLVKEAHARGIKVMLDAVFNHIGDTSAQWQDVLKNQEKSKFADWFHVNSWPATYTPTDDFENAENATYDTFAFTPHMPKLNTANPEVEAYLLKVADYWISEFDIDAWRLDVADEVDHTFWKKFRTTCDAEKDDFYILGEVWHSAQPWLVGDEFSAVMNYAYTDAIKDGLITKKISLEQMVSNINTQLTLYRKQVNQLMFNVLDSHDTPRILTVAKNNKNLMKLVETFTFMQPGVPCIYYGDEYALTGGMDPECRKVMPWEEKDQDLEMFDFFKNLIALRKQYQGILSDSEVEWKIVDSENGIVKFERGSLKAIFNIGEKPAYFSADEVIFSNLVDQNNILQYGFVIYK

SEQ ID NO: 269 - DNA, 1695 bp, Lactobacillus casei ATCC 334
  CDS (1)..(1695)
atgacgatgatgaatgaaataccatggtggaaaaagagcgttgtctatcaggtttatccgaaaagcttcaatgatagtaacggtgatggcgtcggggacttaaatggtatcagtgaaaaattggattatttagccgatttgggcgtagatgtgctctggctgaatccgatttaccgatcgccacaggttgataacggctacgatatttcgaattatcgcgatgttgaaccacaattagggacaatggccgattttgaacacttgttgcaggcagcacatgatcgacatctaaagattatcttggacttggttgtgaatcacacgtctgatcaacatccgtggttcaaagccgccaaatcatcagtgagcgatccgcatcacgattactacatctggaagaagccagttgacgatcatgagcctaataattggggctcaagctttggtggttcagcttgggaatacaaaaaagatctgggcgagtattacctgcatctttttgccaagcaacaaccggatctcaactgggaaaatcctaaggtacgccaagaagtttatgatctcatgcgcttttggctagataagggagttgatggcttccggatggatgtcatatcactgatttctaaagatccggcttatccagatggcccgctcattcaaggcaaggcatacggtagttattatgccggagcggcaaatggccctaaggttcatgattacttgcaggaaatgcacgagcaagtgttgtcgcactacaatatcatgacggtcggcgagacgccccatacaacggcacagcaggcgcaattatacacggcggcagatcgtcacgagttggatatggtttttcattttgaccatatgcatcttgactatggccaatatggcaagttctcgacaaatcgatttaaattagttgatctcaaagaagtcttggcacgttgggagaacacattagcgcaagtcgatggctggaacagcctttactggagcaaccacgatcagccacggcctgtgacacgatttggagatgaaggccagtatcgaattcgatcagccaaaatgctggggactgtgctgcacatgttgcagggaacgccttatatttttgagggagaagaactcggtctgaagaatgttcattttgatcaattaagcgattataacgatcttgagaccaagaacattttcaaagaactcacccaacagcatcatgaaagtcctgaggcggccatgaaggccatttatctgcattcgcgcgataatgctcgtacgccgatgccttgggatggcagtgaaaaaggtggtttcaccaccggacaaccatggctgggactaaatccagatcacaaagacattaatgcagctgaagacttggcagatagtgacggtgtttaccactattatcaacacctgattaaattacgacatgaagagccattgattaccactggtgtatttgagctacttgctcctgatgatccgaacttgtttatttacctgcgcaaaggggaacatgagaccttgctggtggcaggtaacttctcaagtgaggaacgcacatggtcagtgccggatgacttgcaagctaaggatgtggatgtgttgattcggaatagtgaaatttccgattcactagagaaaacactgacattaccaccatttggcgcagtggtgtacaagcttcaatag

SEQ ID NO: 270 - protein, 564 aa, Lactobacillus casei ATCC 334
MTMMNEIPWWKKSVVYQVYPKSFNDSNGDGVGDLNGISEKLDYLADLGVDVLWLNPIYRSPQVDNGYDISNYRDVEPQLGTMADFEHLLQAAHDRHLKIILDLVVNHTSDQHPWFKAAKSSVSDPHHDYYIWKKPVDDHEPNNWGSSFGGSAWEYKKDLGEYYLHLFAKQQPDLNWENPKVRQEVYDLMRFWLDKGVDGFRMDVISLISKDPAYPDGPLIQGKAYGSYYAGAANGPKVHDYLQEMHEQVLSHYNIMTVGETPHTTAQQAQLYTAADRHELDMVFHFDHMHLDYGQYGKFSTNRFKLVDLKEVLARWENTLAQVDGWNSLYWSNHDQPRPVTRFGDEGQYRIRSAKMLGTVLHMLQGTPYIFEGEELGLKNVHFDQLSDYNDLETKNIFKELTQQHHESPEAAMKAIYLHSRDNARTPMPWDGSEKGGFTTGQPWLGLNPDHKDINAAEDLADSDGVYHYYQHLIKLRHEEPLITTGVFELLAPDDPNLFIYLRKGEHETLLVAGNFSSEERTWSVPDDLQAKDVDVLIRNSEISDSLEKTLTLPPFGAVVYKLQ

SEQ ID NO: 271 - DNA, 1779 bp, Lactobacillus casei ATCC 334
  CDS (1)..(1779)
atgtttcaatttgattcatttaccgatcgccgaccttttggcgcggtgcaaaaaggcacggctgtcacattgacggcacaggctgatggtgcggtgacacaagccacacttgtcattatgccagatgaacattgcgatcaaacgcagtccttgccgatgacgaaaagccctaacggctacacagtgacgtttacgcctcctaatgccggtctttggttttatcattttgagttgcaaagcgacaatggccgcgaacgctttggtgcggtcggcggtggttttggcgggctaggtcagctttaccctgaaaatgtggatgtggttaattatcagatgaccgttgtgaccgcatttgatccggttccggcgtggtatcaaaatgcccgtttttatcatatcttcgtagatcgcttcaataatgggaatgctgacggtcacgtgaatgctccgaaggaaaactcttttctgtatgggcgaaaaaccgatcggcccatgtatattcgcgggaacgatggcgagatcattcgctgggatttttacggcggtaatctgactggcattcaacaaaagctgccattattggcagcccgtggcatcaacgccttatatttaagtccaatttttcaggcgcggagcaatcatcggtatgacaccggcgattattttgcaattgatgaagtcttaggttcgctgcatgactttaagcagtttttggcggcagcgcatcagttggggatgcatgtcattctggatggcgtgtttaaccacgtcggcgctgatagccgctacttcaatgccgtcaatgaatattcagacgtgggtgcggctaatagcttggattccccatatgcctcgtggttttcattcaagcgatttcctgatgactacaatagctggtggggcgtgaaggatctgccagccatcaataaggataatcaagattttcatgacttcattgcggctaaaaaaggttcggtgatcagttattggactgacttaggcgttgatggctggcgcttagatgttgccgatgaattgatggacgattttatccggcagattcgcagcacgcttgatcaatttccggagcgggtgctgatcggcgaagtctgggaggatgcctccaataaacaggcttatggcaagcggcggcaatattttgaaggcggcgaattgaatgcagtcatgaattatccgttgcgatccatgttgattgacctgacaaatgggcaattaaacgcggcaggattcgttcgtcaattgatgacgttgaaggagaattatccaacaaatgcgtttgcgttcaatttcaacaacattggcagtcatgatacaccacggattttaacgatgttggatggtgatcggcgtaagttgcagtttatcgtctcgctattttactggctgcctggggtgccgtgcctttactacggggatgaggccgggttaactggcggtaaagacccggataaccgcgccttttatccatggggccatgaagatcaggctgttttggatatttatcaaatcgcgcttcagacccgcatcgaccagcccgccttagcagccggcgccgcttttttcccatttacgtttgaagacagttttggcttcgtccgccaaaatgatacccaaacgctggtggttctggccaatccaactggatcaccacaagtgttacaggatccgcatgctgaattagtgccaaaaagtttgcgcgctttattgccagtaggcacgatggtaccggcaggcggtgtgatttggcagcagatttaa

SEQ ID NO: 272 - protein, 592 aa, Lactobacillus casei ATCC 334
MFQFDSFTDRRPFGAVQKGTAVTLTAQADGAVTQATLVIMPDEHCDQTQSLPMTKSPNGYTVTFTPPNAGLWFYHFELQSDNGRERFGAVGGGFGGLGQLYPENVDVVNYQMTVVTAFDPVPAWYQNARFYHIFVDRFNNGNADGHVNAPKENSFLYGRKTDRPMYIRGNDGEIIRWDFYGGNLTGIQQKLPLLAARGINALYLSPIFQARSNHRYDTGDYFAIDEVLGSLHDFKQFLAAAHQLGMHVILDGVFNHVGADSRYFNAVNEYSDVGAANSLDSPYASWFSFKRFPDDYNSWWGVKDLPAINKDNQDFHDFIAAKKGSVISYWTDLGVDGWRLDVADELMDDFIRQIRSTLDQFPERVLIGEVWEDASNKQAYGKRRQYFEGGELNAVMNYPLRSMLIDLTNGQLNAAGFVRQLMTLKENYPTNAFAFNFNNIGSHDTPRILTMLDGDRRKLQFIVSLFYWLPGVPCLYYGDEAGLTGGKDPDNRAFYPWGHEDQAVLDIYQIALQTRIDQPALAAGAAFFPFTFEDSFGFVRQNDTQTLVVLANPTGSPQVLQDPHAELVPKSLRALLPVGTMVPAGGVIWQQI

SEQ ID NO: 273 - DNA, 1668 bp, Lactobacillus casei ATCC 334
  CDS (1)..(1668)
atgacgaacgaaactagccgtacttggtggcaacaagaaattttctaccaaatctatccggcctcattcaaagatagcaataatgacggcataggcgatctgcctggcatcactgccgaattaccgaagttaaaagaattaggcattaccacgatttggttatcgccggtttataagagccccatggttgacaatggttatgacattgccgactatcaggcgattgatccgcgctttgggaccatgactgactttgatcagctcatggcaactgccaaagatctcggtatcaaagtggtaatggatttggtggtcaaccatacgtccgatcagcaccggtggtttcaagcggcgctcaagaatccggcctcaccatatcgggacttctatattttccgccaaggtcatgatggtcagccgccgaacaactggcgctcaaacttcggcgctggctcgtcatggacggcggttcccggtgagcccaacacctattatcaccacgtcttttccccacaacaaccggacctgaattgggaaaatccgaagttgcggcaagccatttatagcatgatcaactggtggctagccaaaggcctcgccgggttccgggttgacgccattacgtttatcaaaaaggatcaggattttgcttccatcacgccagatggcagcgatgggttaggcaaagttaagcgcaaaacggaaaatcgaccgggtctggatcaatttctcaaagagttgaacgttgccacctttaagccggccaatgccgtcacgatcggggaagcgtctggcgttgcatacgatcaactcggcgacttcattggcgaaaacggctacttctcaatgatttttgattttcattacgccgacattgacgtcgcttctgggtctgagtggttcaagcaaaccaactggacgccaaaaatgcttggcaaggcgattgccaaaagccagctggcaattcaaaaagttggctggggggctaatttccttgaaaatcatgatcaaccgcgaagcctaagcaagtatatccgtgagccgcaatatcgcaatgcgatcggggcaaaagcattagcactgttatacttcggtttacgtggctgcccgtttatctatcaaggccaagaactcggcatggtcaatgcggtgcgaaccaacattgatcaattcaacgacctttccgcgcacgacaactatcgccgtgcattggcagaaggttactccgaagctgatgcccttgcttgtgtcaaccgacgctcacgtgacaatgcccgtacgccatacccatgggacgacagccaaaatggcggcttcaacgctggtcatgaaccttggttaccgctggccaagcaagctgctggcgtgaactggcaggcagaacacgatgatcccaattcggtctggacgttttatcaaacgctctgccgcctgcggaatgcatcaccattgcgcgccgatttgatcgaaggcgactttgccccgctggatgcacacaacgacaacgtgattgcctatgcccgcgggcaacatgtccaaatttttgtgaatcttagctcgaagccagccgcagttgacttaccagccggtcacgtttggctgaacaattactcggatgttggaacgagcttacaaccctatcaagcgattcttattgaggtgaaatga

SEQ ID NO: 274 - protein, 555 aa, Lactobacillus casei ATCC 334
MTNETSRTWWQQEIFYQIYPASFKDSNNDGIGDLPGITAELPKLKELGITTIWLSPVYKSPMVDNGYDIADYQAIDPRFGTMTDFDQLMATAKDLGIKVVMDLVVNHTSDQHRWFQAALKNPASPYRDFYIFRQGHDGQPPNNWRSNFGAGSSWTAVPGEPNTYYHHVFSPQQPDLNWENPKLRQAIYSMINWWLAKGLAGFRVDAITFIKKDQDFASITPDGSDGLGKVKRKTENRPGLDQFLKELNVATFKPANAVTIGEASGVAYDQLGDFIGENGYFSMIFDFHYADIDVASGSEWFKQTNWTPKMLGKAIAKSQLAIQKVGWGANFLENHDQPRSLSKYIREPQYRNAIGAKALALLYFGLRGCPFIYQGQELGMVNAVRTNIDQFNDLSAHDNYRRALAEGYSEADALACVNRRSRDNARTPYPWDDSQNGGFNAGHEPWLPLAKQAAGVNWQAEHDDPNSVWTFYQTLCRLRNASPLRADLIEGDFAPLDAHNDNVIAYARGQHVQIFVNLSSKPAAVDLPAGHVWLNNYSDVGTSLQPYQAILIEVK

SEQ ID NO: 275 - DNA, 570 bp, Lactobacillus delbrueckii subsp. bulgaricus ATCC BAA-365
  CDS (1)..(570)
atggtctaccagatattcccggactgcttcaacaacggcaacccgcatggggagatccagggccgcaagaaggacagtttcatctacgcgaccaaggaagacagtccttactatattaaggatgagcatggcgatatagcccgctgggacttttttggcggcaacctcgaaggtatccggcaaaagattccctatttaaaggatttgggagtgacggccatctacttgaacccgatcttccaggcttccagcaaccaccgctatgacacccaggacttcatgaagatcgaccccatgctggggaccgaggaggacttcaagaacttgatcaaggacctgcacaaaaacaggattgccttgatcttagacggggtcttcaaccatgtcggggccgacagcaagtacttcttgagcgcggtcactgacaagacgggcccttactactcctggttcaacttcatcaattatccgactaagtaccagtcctggtggggggaaccacgcttcctgaagtcaacaagagtaatgctgactaccagaacttcatctgcgggcccgacggcgttttag

SEQ ID NO: 276 - protein, 189 aa, Lactobacillus delbrueckii subsp. bulgaricus ATCC BAA-365
MVYQIFPDCFNNGNPHGEIQGRKKDSFIYATKEDSPYYIKDEHGDIARWDFFGGNLEGIRQKIPYLKDLGVTAIYLNPIFQASSNHRYDTQDFMKIDPMLGTEEDFKNLIKDLHKNRIALILDGVFNHVGADSKYFLSAVTDKTGPYYSWFNFINYPTKYQSWWGEPRFLKSTRVMLTTRTSSAGPTAF

SEQ ID NO: 277 - DNA, 1827 bp, Deinococcus geothermalis DSM 11300
  CDS (1)..(1827): transl_table=11
atgaacatcatctttgccgacctgcccgcgacccacgaccacacgcccgcctacacctctcggctcggtgccgctgtgggtgagctggtgacgctgcgcctcaagacgacgctgccggtgatcgcagtgtttctcaaactgctcgaacacggtgaaatcacgacccaccctgcccgcgagatcgggccgctcgacggcgagggccgctggttcgagttcgacctgcgcctgcacgcccgccgggtgcattatgcctggcaactccagaccgctgaagacaactggcacttcaccatggcgggcctgcaccacacccgccgaccctaccgcgactggtttcactacgtggcggactaccaggcgcccacctgggtctggaaaagcgtcttctatcagatctttcccgaccgcttccgcaacggaaaccctgcaaacgacgtgcagaccggcgagtatgtctacagcggtgccccggtggttcacgtgccctgggacgtgccacccacccgcgaactcgacattcacgcccactacggcggcgacttggagggggtcgcccaggccatgccctacctggccgatctcggcgtcaacgcgctgtggctgacccccatcttcgtgagtcccagcgcccaccgctacgacatcaccgactaccgcaccattgatccacacctgggcggcgaggcggcctttggcgagatgctgcgcgcggcgaatgcatacgggatccggatcgtgttggacggcgtgtttaaccataccggcagcgagcatgcgcttttccaacgggcgctccatgacgcctcggctcccgagcgcgagctgttcaccttccgcgaggccacaggcggcaagcctccctacgcggcctttttcgacgtgcccaccctgcccaagatcgactaccgctcggcagtcgccgtgaacgagttcctggcgggcgaggagagcgtggtgcgcttctggctgcggcggggggcggcgggctggcggctggatgtggcgcagcagatcgggcggggcggcaccgacgagggcaacctcgaactgcatcgccagcttaagcaggccgcccgcgaggaacggcctgacgcctacatcttcggagagcgcttctttgattcagaagcggcgctgaccggcgagggcgaggacggcgtgatgaattatcacggtttcggcctgccgctgatggagtggtttgcaggcgaacattacctgggctttcgctcgcgcatgacgacggcagaactgctcgacctgctgtgggacgcttaccacgtgttggcgccgcagctggcgctgaaccagttcaacctgctcgactcgcacgacatcccgcgtgccctctcgcggctgggggagaacaagaccaagctgcgcgccgccctcacgctgctgatgggttatcccggcgtgccctgcctctactacggcaccgagatcggcctctcgcagctcgagcgcggcctgatgccctttaaccgcgctccaatgccctgggacgaaacccgctgggaccttgacctgcgcggctttgtgcaggccctgatccgggttcgccgctccgcacgggtcttgcaggagggagcactgcgctttttgttggaggagtcggacgctctcgggtatctgcgagcctacacccaccctgacggacggcgtgaactggccgccgtgctgggcagccgccgagggagccagcacgaggtcaccgtcacattgcctcggggtgactggcgggacgcgctgaccggcgagcttgtctcccggggcggtgagacgcggctcgacgtggcccaggggcggttgctgttggcctga

SEQ ID NO: 278 - protein, 608 aa, Deinococcus geothermalis DSM 11300
MNIIFADLPATHDHTPAYTSRLGAAVGELVTLRLKTTLPVIAVFLKLLEHGEITTHPAREIGPLDGEGRWFEFDLRLHARRVHYAWQLQTAEDNWHFTMAGLHHTRRPYRDWFHYVADYQAPTWVWKSVFYQIFPDRFRNGNPANDVQTGEYVYSGAPVVHVPWDVPPTRELDIHAHYGGDLEGVAQAMPYLADLGVNALWLTPIFVSPSAHRYDITDYRTIDPHLGGEAAFGEMLRAANAYGIRIVLDGVFNHTGSEHALFQRALHDASAPERELFTFREATGGKPPYAAFFDVPTLPKIDYRSAVAVNEFLAGEESVVRFWLRRGAAGWRLDVAQQIGRGGTDEGNLELHRQLKQAAREERPDAYIFGERFFDSEAALTGEGEDGVMNYHGFGLPLMEWFAGEHYLGFRSRMTTAELLDLLWDAYHVLAPQLALNQFNLLDSHDIPRALSRLGENKTKLRAALTLLMGYPGVPCLYYGTEIGLSQLERGLMPFNRAPMPWDETRWDLDLRGFVQALIRVRRSARVLQEGALRFLLEESDALGYLRAYTHPDGRRELAAVLGSRRGSQHEVTVTLPRGDWRDALTGELVSRGGETRLDVAQGRLLLA

SEQ ID NO: 279 - DNA, 1491 bp, Deinococcus geothermalis DSM 11300
  CDS (1)..(1491): transl_table=11
atgccgccctctacaccctcttccgaagcacaccctctcacgcccgaatgggtcgcggacgccgtcttctatcagattttccccgaccggttcgcacgcagcgggcgagtgccgggcctgaaccttcagccctggggcagcccgccgcaggtgcacgggtatatgggcggcgacctgtggggggtcacccagcatctggaccacatcggggcactgggggtaaacgcgatctacttttgcccggtatttcagtcggcttccaaccaccgctaccacacccacgactactaccgggtagatcccatgctggggggcaacgaggcgctgcgggcgctgatcgaggcggcgcatgcgcggggcatccgcatcgtgctggacggcgtctttaaccatgccagccggggcttttttcagttcaacgacctcttggaacagggcgaggcgagcgcctaccgtgactggttccatgtggagggatggcccctgcacgcctacgacgacacccgaccggcgaactatcaggcgtggtggggccttcgcgcgctgccgaaattcaacaccggcaacccggccgtccgcgagttcttgtgggacgtgggcacgtattggatggagtttgggattgacggctggcggctcgacgtacccaacgaaatcgatgacgacgagttctggcgcgagttccgccgccgcgtgaaggccatcaatcccgacgcctacatcgtgggcgaaatctggggcgacgcgcaccgctggcttgccggggaccagttcgacgcggtgatgaattatcacttcacccggccctgtctggcgttttttgcggcgcgaaccctcgcacaggcggccaacgagtccaccggcctaggccgtgtggagccactcgacgctgccgccttcgcccgccgcatgaccgagatcacagcgctgtatcaccccgagatcgtccgcgcgcagctcaacctgctcgactcacacgacacagcccgcttcctgaccgccgcgggcggcgacgcgaccgcctttcgcctcgccagcatctttcagatgacctacgtgggggcgccgtgcatctactacggtgatgagatcggtcttcccggcggccctgaccccgactgccgccgcgctttcccctggcacgacgaggcgagctgggacaaagagacgctgagcctgctgcaaaagctcaccgccacccgccacgccacccccgccctgcgccggggagcattccgcttcacccacgcggaaggcgaggcgctggtctacgtccgcgaacacgccgccggcaacgcctacatcgccatcaatgccgcccaagcccccgcccgcctgcccctcagcgacgtgcagcccggccgataccgcgacgccctgagcgggcagcgtcacgagttgagcggagaaacggaggtcgaggttccggggcgcgcggcggtggtgctggtccgggcggaggaggattcgcggcacaccgcgcggcactga

SEQ ID NO: 280 - protein, 496 aa, Deinococcus geothermalis DSM 11300
MPPSTPSSEAHPLTPEWVADAVFYQIFPDRFARSGRVPGLNLQPWGSPPQVHGYMGGDLWGVTQHLDHIGALGVNAIYFCPVFQSASNHRYHTHDYYRVDPMLGGNEALRALIEAAHARGIRIVLDGVFNHASRGFFQFNDLLEQGEASAYRDWFHVEGWPLHAYDDTRPANYQAWWGLRALPKFNTGNPAVREFLWDVGTYWMEFGIDGWRLDVPNEIDDDEFWREFRRRVKAINPDAYIVGEIWGDAHRWLAGDQFDAVMNYHFTRPCLAFFAARTLAQAANESTGLGRVEPLDAAAFARRMTEITALYHPEIVRAQLNLLDSHDTARFLTAAGGDATAFRLASIFQMTYVGAPCIYYGDEIGLPGGPDPDCRRAFPWHDEASWDKETLSLLQKLTATRHATPALRRGAFRFTHAEGEALVYVREHAAGNAYIAINAAQAPARLPLSDVQPGRYRDALSGQRHELSGETEVEVPGRAAVVLVRAEEDSRHTARH

SEQ ID NO: 281 - DNA, 2097 bp, Deinococcus geothermalis DSM 11300
  CDS (1)..(2097): transl_table=11
atgcctgccgtgcagttcctacggtgggggaatggagcctgccacgatcagcgccttccgcgtccgacgcaagcggctcgggccaagcctcgacttcggaagtttctttctgttcttcggcatctcgggaaccgacgagggccggggagaacgcctgcaaaaacgcttcgagggcgagtactaccgccacctcgtgacgctgaagctctcggggagcgtcccgccgggccggtactggttgcgcgacctgacggaggaagcgaacaaacggggctggacggttcgggcggacggcagagccaccagcgacctgagcgacgagggtctccgcgacctgaacacctggctggcgagtggcgcgcgccaggttcacctggacccgctgaacgagtcatccccgcgccgataaggcacggccttcgccggaggccgtcggggaaccgatcgggaactgaatcgattcagtcgcctgcttttcctgctacgctttcaggtatgacccagcccagcgaactgaagtggtggcagcgcggcatcatctaccagatttacccccggtcgtttcaggacgcctccggagacggagtaggggacctgcgcgggatcacctccaggctgccctacgtggcgggcctgggggtggaggcggtgtggctctcccccatcttccgcagcccgatgcgcgacttcggctatgacgtggccgattactgcgacatcgaccccctcttcggcacgctggaggacttcgatgcgctggtggccgaggcgcaccggttggggctgaaggtgatgctcgactacgtgcccaaccacacctcctcagaccatccctggttccaggaggcccttgcgggcaaggacagtccgaagcgggactggtacgtctggcgcgatccggcaccagacggcgggccgcccaacaactggaagtcatttttcgggggggacgcctggaccttcgatccccacagcggccagtattacctgcatcagtttctgccggggcagccggacctgaactggcgcaaccccgaggtgcgcgcggcaatggcggacgttctgcgcttctggatgcgccggggcgtggacggcttccgggtggacgtgatctggctgctggccgaggacgccgagtttcgcgacgagccggaaaatcctgagtggcagccggggcagatcgaacacgcccgtctgctgcacatctacacccaggaccaaccggagacgcacacctatatccgcgagctgcggcaggtgctcgacgagttcgacgaccgcatgatggtgggagaaatttacctgccgctgaagcagctgttgccctacgcgggcacgccggacgcgccgatggtgcatctccccttcaacttccacctgatcctgctgccctgggatgcccgcgagattcgcgccttcgcggacgagtacgacgcggcctgccgggcggcgggcacctggccgaactgggtgctcggcaaccacgaccagccccgcttcaagtcgcgggtgggcgcagaccagtaccgggtcgcacagacgctgctgctcaccctgcgcggcacccccactgcctactacggcgacgaaatcggcatgcacgatgtccccatcccccccgagcggcggatggacccggcgggcctccagcagcccgacgtgccgagtgcgggccgcgatcccgagcgcaccccgatgcagtgggacagcggccccaacgcgggcttcacagcccccgacgtgcaaccctggcttcccctggcagacgacgctgaccgggtgaacgtgcaggtggaggaggcagaccccaccagcgacctgaactacttccgggcactcacagcgctgcgccgcgcccatccggcgctggtggccggtgactaccgctcgctggatacggaacacgcggacgtcttcgccttcgagcggacgctggcgggggaacagctggtcgtgctgctgaatttcggcggggaggaacgcgcgttggggcctcttgtgggcgagggacagaccctcctgagcagccggaatgactccccggcaagcaccgctcccctgcgccccaatgaggcgcgcatcatccgccgccagtag

SEQ ID NO: 282 - protein, 698 aa, Deinococcus geothermalis DSM 11300
MPAVQFLRWGNGACHDQRLPRPTQAARAKPRLRKFLSVLRHLGNRRGPGRTPAKTLRGRVLPPPRDAEALGERPAGPVLVARPDGGSEQTGLDGSGGRQSHQRPERRGSPRPEHLAGEWRAPGSPGPAERVIPAPIRHGLRRRPSGNRSGTESIQSPAFPATLSGMTQPSELKWWQRGIIYQIYPRSFQDASGDGVGDLRGITSRLPYVAGLGVEAVWLSPIFRSPMRDFGYDVADYCDIDPLFGTLEDFDALVAEAHRLGLKVMLDYVPNHTSSDHPWFQEALAGKDSPKRDWYVWRDPAPDGGPPNNWKSFFGGDAWTFDPHSGQYYLHQFLPGQPDLNWRNPEVRAAMADVLRFWMRRGVDGFRVDVIWLLAEDAEFRDEPENPEWQPGQIEHARLLHIYTQDQPETHTYIRELRQVLDEFDDRMMVGEIYLPLKQLLPYAGTPDAPMVHLPFNFHLILLPWDAREIRAFADEYDAACRAAGTWPNWVLGNHDQPRFKSRVGADQYRVAQTLLLTLRGTPTAYYGDEIGMHDVPIPPERRMDPAGLQQPDVPSAGRDPERTPMQWDSGPNAGFTAPDVQPWLPLADDADRVNVQVEEADPTSDLNYFRALTALRRAHPALVAGDYRSLDTEHADVFAFERTLAGEQLVVLLNFGGEERALGPLVGEGQTLLSSRNDSPASTAPLRPNEARIIRRQ

SEQ ID NO: 283 - DNA, 1662 bp, Anaeromyxobacter dehalogenans 2CP-C
  CDS (1)..(1662): transl_table=11
atggcgatctcgcagcgcaggcgggcggtcgatccgctctggttcaaggacgcggtcatctacgagacgcacgtgaagtcgttctacgactccaacggcgacggcgtgggcgacctgcgcgggctcgtggagaagctcgactacctccaggacctcggcatcacctgcctgtggctgctgccgttcttcccgtcgccgctgcgcgacgacggctacgacatcgccgactacaagggcatccaccccgactacggcacggtggacgacttccgccagctggtcgcggcggcccacgcccgcggcatccgggtggtggtggagctggtggtgaaccacacctccgaccagcacccctggttccagcgggcgcgccgcgcgccggccggctccccggagcgcgcctactacgtgtggagcgacaccgacgagcgctaccgcgacgcccgcatcatcttcaccgacaccgagaagtcgaactggacctgggaccccgaggccaagcagtactactggcaccgcttcttctcgcaccagccggacctcaacttcgagaacgcggtggtgctgggcgaggtgctggacgcgctgcgcttctgggcggagatgggcgtggacggcttccggctcgacgcggtgccgtacctgatcgagcaggacgggacgagctgcgagaacctgcccggcacgcacgaggtcatccggaagatccgggcctacgtggaccagcacttccccgggcgcatgctgctcgccgaggcgaaccagtggccggccgacgtgcgcccctacttcggcgagggcgacgagtgccacatggcgttccacttcccgctcatgccgcgcatcttcatggcgctgcggctcgaggacgtggagccgatcgtcgagatcatgcggcgcaccccggccatcccggacacctgccagtgggcgctgttcctgcgcaaccacgacgagctgacgctggagatggtgaccgccgacgagcgcgactacatgtacctcgcgtacagccaggatccgcgcatgaagctgaacgtcgggatccggcgccgcctcgcgccgctggtggacaacagccgccggcgcatggagctgctcaactcgctcctgttctccttccccgggacgcccatcgtctactacggcgacgagctcggcatgggcgacaacatctacctgcacgaccgcaacggcgtgcgcacgcccatgcagtggagcccggaccgcaacgccggcttctcccgcgccgaccccggccggctctactccgcgcccatctccgacgcggtgtacggctaccaggcggtgaacgtcgaggcccagctccgcgacccctcctcgctgctgcactggatgcgcaacaccatcgcgctgcgcaagctgttccgggcgttcgggcggggcaccatggagttcctgccggtgcagaaccgcaaggtcctcgcctacgtgcgccgccacgacgaggacgtgatcctgtgcgtggcgaacgtgtcgcgcttcgcgcagccggcgcagctcgacctctcccacctcgagggctacgtgccggtggagatggtcggctacaccgagttcccgcgcatcgggcggcagccctacgcgctcacgctcgcgccctacggctacttctggttcgagctgcgcaagcccgcctga

SEQ ID NO: 284 - protein, 553 aa, Anaeromyxobacter dehalogenans 2CP-C
MAISQRRRAVDPLWFKDAVIYETHVKSFYDSNGDGVGDLRGLVEKLDYLQDLGITCLWLLPFFPSPLRDDGYDIADYKGIHPDYGTVDDFRQLVAAAHARGIRVVVELVVNHTSDQHPWFQRARRAPAGSPERAYYVWSDTDERYRDARIIFTDTEKSNWTWDPEAKQYYWHRFFSHQPDLNFENAVVLGEVLDALRFWAEMGVDGFRLDAVPYLIEQDGTSCENLPGTHEVIRKIRAYVDQHFPGRMLLAEANQWPADVRPYFGEGDECHMAFHFPLMPRIFMALRLEDVEPIVEIMRRTPAIPDTCQWALFLRNHDELTLEMVTADERDYMYLAYSQDPRMKLNVGIRRRLAPLVDNSRRRMELLNSLLFSFPGTPIVYYGDELGMGDNIYLHDRNGVRTPMQWSPDRNAGFSRADPGRLYSAPISDAVYGYQAVNVEAQLRDPSSLLHWMRNTIALRKLFRAFGRGTMEFLPVQNRKVLAYVRRHDEDVILCVANVSRFAQPAQLDLSHLEGYVPVEMVGYTEFPRIGRQPYALTLAPYGYFWFELRKPA

SEQ ID NO: 285 - DNA, 1638 bp, Anaeromyxobacter dehalogenans 2CP-C
  CDS (1)..(1638): transl_table=11
atgaccccgtcccgccgccccgccgcgctcctcgccgtcgccctcgccgtcgccctcgccgcgctcgcctgcgcgcatgcgcccgccggccccccggccgccggcggcgcgcgggcggcctccgcaccggcggcgccctggtggaagggcgcggtcttctacgaggtgttcgtgcgcagcttcgcggactccgacggcgacgggaagggcgacctccgcggcctcaccgcgaagctcgactacctgaacgacggcgacccggccacctccaccgacctcggcgtggacgcgctctggctcatgccggtgttcgcctcgccgagctaccacggctacgacgtcaccgattacctgaaggtcaaccccgactacggcaccgaggccgacctcgaccggctcgtcgccgaggcgcaccggcgcggcgtccgcgtggtcctcgacctcgtcctcaaccacacctccgaccagcacccctggttccgcgagtcggcgtcgtcgcgcacctcgccgcgccgcgactggtacgtgtggcgccaggacgacccgggctggacgcagccgtggaacccggcgcagggcacctggtaccgccgcggcggcgagtggtactacgccgtcttctggagcgggatgccggacctgaactaccggaacccggcggtgcgcgaggaggcgaagcggatcgcggcgcgctggctggcgaagggcgtggacgggttccgcctggacgccatccgccacctcatcgagaccggcccgggggcgggccagtccggctcggcggagaaccacgtgttcctgcgcgagttcgcggcggcggtttgggccgcgaagccggacgcggtgctggtgggcgaggtctggtcggagaccgacgacatcgcccgctactacggggacgggaaggacgagttgcagctcctgttcgacttcccgctcgcgaaggcgatcgtggagggggtggacgcgggcgacggcggcttcaccgcgcacgtgctccgcgaggtcgccgcggcctacccgccgggcgcggtggacgccccgttcctcaccaaccacgaccagttccgggtcgcgacgcagctcgcgaacgacgccgggaagctccggctcgcggcggccatcctgctcacgctgccgggcgcgccgttcgtctactacggcgaggagctggggatgcagaacggccccggccgcgaggacgagtggaagcggacgcccatgccctgggaccgctcggagcacggcggcttcaccaccggtgacccgtggatgccgctcgcgccggggcacgagagcgccaacgtggccgcggaggcgggcgatccggcgtcgctgctgtcgaggtaccgggcgctggtccgggcgcggagggcgtcggcggcgctgtcgcgcggggatgcggtgccgctgtccacgccgggggcggcgctcgcgtacgtgcggcgggccgagggggagacggtgctggtggtgcacaacatgggcgccgcgccgctcgagctgggcgggctggaggcgccgggggcggcggcggaggcggtgttcgtggatgcgggggccgtggcggtgcgggaggcgggtgggtggcgggtcgtgctgccgccgcgggcctccggggtttggagggtgaggtag

SEQ ID NO: 286 - protein, 545 aa, Anaeromyxobacter dehalogenans 2CP-C
MTPSRRPAALLAVALAVALAALACAHAPAGPPAAGGARAASAPAAPWWKGAVFYEVFVRSFADSDGDGKGDLRGLTAKLDYLNDGDPATSTDLGVDALWLMPVFASPSYHGYDVTDYLKVNPDYGTEADLDRLVAEAHRRGVRVVLDLVLNHTSDQHPWFRESASSRTSPRRDWYVWRQDDPGWTQPWNPAQGTWYRRGGEWYYAVFWSGMPDLNYRNPAVREEAKRIAARWLAKGVDGFRLDAIRHLIETGPGAGQSGSAENHVFLREFAAAVWAAKPDAVLVGEVWSETDDIARYYGDGKDELQLLFDFPLAKAIVEGVDAGDGGFTAHVLREVAAAYPPGAVDAPFLTNHDQFRVATQLANDAGKLRLAAAILLTLPGAPFVYYGEELGMQNGPGREDEWKRTPMPWDRSEHGGFTTGDPWMPLAPGHESANVAAEAGDPASLLSRYRALVRARRASAALSRGDAVPLSTPGAALAYVRRAEGETVLVVHNMGAAPLELGGLEAPGAAAEAVFVDAGAVAVREAGGWRVVLPPRASGVWRVR

SEQ ID NO: 287 - DNA, 1602 bp, Anaeromyxobacter dehalogenans 2CP-C
  CDS (1)..(1602): transl_table=11
atgccgctcatgcccggtctccgccgcgcccgcagcgcgccccgcctcgcgaccgtcgcgctcgccgcctgcgcggtcctcgggctcgtggggctcgcggcctgcgcgccgcgcgcaccctccggcccgccggccggcgccgccgcggcggccgcgctcgccgaggcgccgccccggccgctgccgccgcgcccgtggcaggacgaggtcctctacttcgtgctggtggaccgcttcgccgacggcgaccgcggcaacgaccaggacgtggacctcgccggcaagggcacgttccacggcggcgacctgcgcggcctcaccgcgcacctcgacgacctcgccgcgctgggcgtgaccgcgatctgggtgaacccgctggtgcgcaacatccccggctacgtgagcggcgccgggttcccggactgggcctaccacggctactggatggacgacctgtcgcgcctcgacccgcgcttcggcagcgaggccgacctggccgccttcgtgaacgcctgccacgcgcgcggcatccgcgtgctgctcgacgtggtctacaaccacgccggctacgacaccgcctacctgcgcgatccccgcacgcgcccgtggctgcgcaacaacgtggtgggcgactgcggcgacgacgacctgacgagctgcctggccggcctgcccgactggaagaccgagctgcccgaggtccgcgagttcctgctcgccgcccagttcggctgggcgaagcgctcgggcgtggacggcttccggctcgacaccgtgaagcacgtcgagccggacttctgggcgctccaccggcggcgggtgcgcgccgagctcgtcccggggttcttcctgctcggcgagctgtggggcggcgaccgcgagtccctcgatccgtacttcgccgccgacacgctcgacgccggcctcgacttcggcttccagggctcgaccgtgggctggctgctcgggcgcggccgcaccatcgcctacgagcggtacctcgcgtcgcgccacaaggtccggcccgggcacctcctcgcgcactacctctcctcgcacgaccagcccggcgcgctgcacctgctcggcggcgaccgcgcgctgttccgcctcgccgcgctcctgcagctcaccaccctgggcgtcccgacgatcttctacggcgaggaggtggcgcggcccatcggcgagtggccggacaatcgttccgacatgccatgggggcaaatggacgtgctccccggcgccggaaagccgcgcgacgaggcaatgcgcgcgttctaccgacgggtcatcgccctgcgtcgcgcccaccccgccctgtcccgcggaacccacgagccggtgtccaccgacggtgacggcctggccttcctgcggcgcgacggggacgacgcggtgctggtcgcggtgaaccgcggcaagtcgccactctcgctgcggatccccgtgccggccggctgggaggggcgggagctggaggacgccctggagggcgaggcgatatcggtcggcgccggcggggtggcgctggagctcccgggtcacggcgcccgcgtcgtggtggcgaggccagcacccggcgcggcgattcgtcgctaa

SEQ ID NO: 288 - protein, 533 aa, Anaeromyxobacter dehalogenans 2CP-C
MPLMPGLRRARSAPRLATVALAACAVLGLVGLAACAPRAPSGPPAGAAAAAALAEAPPRPLPPRPWQDEVLYFVLVDRFADGDRGNDQDVDLAGKGTFHGGDLRGLTAHLDDLAALGVTAIWVNPLVRNIPGYVSGAGFPDWAYHGYWMDDLSRLDPRFGSEADLAAFVNACHARGIRVLLDVVYNHAGYDTAYLRDPRTRPWLRNNVVGDCGDDDLTSCLAGLPDWKTELPEVREFLLAAQFGWAKRSGVDGFRLDTVKHVEPDFWALHRRRVRAELVPGFFLLGELWGGDRESLDPYFAADTLDAGLDFGFQGSTVGWLLGRGRTIAYERYLASRHKVRPGHLLAHYLSSHDQPGALHLLGGDRALFRLAALLQLTTLGVPTIFYGEEVARPIGEWPDNRSDMPWGQMDVLPGAGKPRDEAMRAFYRRVIALRRAHPALSRGTHEPVSTDGDGLAFLRRDGDDAVLVAVNRGKSPLSLRIPVPAGWEGRELEDALEGEAISVGAGGVALELPGHGARVVVARPAPGAAIRR

SEQ ID NO: 289 - DNA, 1188 bp, Streptococcus pneumoniae TIGR4
  CDS (1)..(1188)
atgaattacttgcaagacttgggtattactggactatatctttgtcccatctttgaatctacaagcaatcacaagtacaatacgacagattactttgaaattgaccgtcattttggagacaaggagacctttcgggaactggtggatcaagcgcatcatcgtggcatgaaagtcatgctggatgcggtatttaatcatattggttcgcaatctcttcaatggaaaaatgtcgtcaaaaatggtgaacagtctgcttataaggattggttccatattcaacaattcccagtgacaactgaaaagctagttaataagagagacttaccctatcatgtttttggtttcgaggactatatgcctaagctaaatacagccaatccagaggtcaagaattatcttttaaaggttgcgacttattggattgaagagtttaatatcgatgcttggcgtttggatgtggctaatgagattgaccatcagttctggaaggattttcgtaaggcagttttagctaaaaatcctgatctttatatcctaggagaagtctggcatacatctcagccttggctaaatggagatgagttccatgccgtcatgaattatcctttatctgatagtatcaaggactatttcttacgaggaattaagaagacagaccagttcatcgatgaaatcaatggagagtctatgtattacaagcagcagatttcagaggtcatgtttaatctcttggattcacatgatacagagcgaatcctgtggacggccaatgaagatgttcaactggttaaatcagccttagcctttctctttttacaaaaaggaacaccgtgcatttattacggaaccgagctagccttgactggaggaccagatccagattgtcgtcgttgtatgccttgggaacgtgtatcaagtgacaatgatatgctgaactttatgaagaggctgattaaaattcggaaatacgcgtcagtaatcatttcgcatggcaagtatagccttcaagaaatcaactctgatctagtagctctggaatggaaatacgaaggacggatcctcaaagcaatattcaaccaatcaacagaagattatcttttagagaaagaagcagtagcactagcaagcaattgccaagaattggataatcagcttgtcatctctccagatggatttatgattttctaa

SEQ ID NO: 290 - protein, 395 aa, Streptococcus pneumoniae TIGR4
MNYLQDLGITGLYLCPIFESTSNHKYNTTDYFEIDRHFGDKETFRELVDQAHHRGMKVMLDAVFNHIGSQSLQWKNVVKNGEQSAYKDWFHIQQFPVTTEKLVNKRDLPYHVFGFEDYMPKLNTANPEVKNYLLKVATYWIEEFNIDAWRLDVANEIDHQFWKDFRKAVLAKNPDLYILGEVWHTSQPWLNGDEFHAVMNYPLSDSIKDYFLRGIKKTDQFIDEINGESMYYKQQISEVMFNLLDSHDTERILWTANEDVQLVKSALAFLFLQKGTPCIYYGTELALTGGPDPDCRRCMPWERVSSDNDMLNFMKRLIKIRKYASVIISHGKYSLQEINSDLVALEWKYEGRILKAIFNQSTEDYLLEKEAVALASNCQELDNQLVISPDGFMIF

SEQ ID NO: 291 - DNA, 1407 bp, Arthrobacter sp. FB24
  CDS (1)..(1407): transl_table=11
atgacggaaccggactgggtaaaacacgcaatctggtggcaggtctacccgatcggctttgtcggcgcggagcaggctgccgctgaacgggcgtccaaggcgccgacgtccgaggcgccgggccagactgtggcccatcggctggggcagctggttccctggcttgactacgtgctggaactcggcgcgtccgggctcgcgctggggcccgtcttcgcctcggaaacccacggctatgacaccacggactacttcaggatcgatccccggctgggcgatgacgcggactttgacgagctcatcgcccagtgccacgcccgcggactgaaagtcctgctggacggcgtcttcaaccacgtggggcgcagcttcggggcgttccagggtgtgctcacggacggtcccgggtctcctgccgcctcctggttccgcctgcggtggccggagtccggatgggcgccggggaccgaaccgggctacgaggattttgagggccatcatcacctggtggcgctcaaccacgatgaaccggcagttgccgccctggtcacggacgtgatgaagcactggctaggccggggagcggacggctggcggctggacgcggcgtacgctgtgccggcgtcgttctgggccccggtgctggctgaggtgcgccgcgagtatccggactcctatttcgtgggcgagtacatccacggcgacttcgccgaggaggtggagcggagcacgctcgactcggtcacgcagtacgaactgtggaaggccgtctggagttcactcaacgatgccaacttctacgaactcgcatccgcgctcgagcggcacaacgggttcctggacaccttcgtgccgctcacgttcgtgggcaaccacgacgtcacccgcctggccagcaagctgacgaacccggaccagctggcgcttgcgctcacagtcctcctgaccgtgggcgggacgccctgcatctactacggagacgagcaggctttccgcggcgtcaaggaggaccgggccggcggagatgacgccgtccgtccggcgttccccgcggggcccgcagaactggcggaggacggctggtccgtctaccacctgcaccaggaactgatcagcctccgacggcggcatgcctggctgcaccgggcccgcaccacggtcctggcgctcagcaacgaacacctcgtttaccaggtccgcggcgacggtaaggcagcagcaggtagcacagaggagggcggcgcaggcgccgcgctgacagtcgcgctgaacctttccggcacgccggcggacctgcccgtaccgtccgggtcaggcggcctcctggccgggcgggcccaccggcatccggatcgggatgccgtgggcctgcccggttacgggtgggcagtgctcgggaacagctag

SEQ ID NO: 292 - protein, 468 aa, Arthrobacter sp. FB24
MTEPDWVKHAIWWQVYPIGFVGAEQAAAERASKAPTSEAPGQTVAHRLGQLVPWLDYVLELGASGLALGPVFASETHGYDTTDYFRIDPRLGDDADFDELIAQCHARGLKVLLDGVFNHVGRSFGAFQGVLTDGPGSPAASWFRLRWPESGWAPGTEPGYEDFEGHHHLVALNHDEPAVAALVTDVMKHWLGRGADGWRLDAAYAVPASFWAPVLAEVRREYPDSYFVGEYIHGDFAEEVERSTLDSVTQYELWKAVWSSLNDANFYELASALERHNGFLDTFVPLTFVGNHDVTRLASKLTNPDQLALALTVLLTVGGTPCIYYGDEQAFRGVKEDRAGGDDAVRPAFPAGPAELAEDGWSVYHLHQELISLRRRHAWLHRARTTVLALSNEHLVYQVRGDGKAAAGSTEEGGAGAALTVALNLSGTPADLPVPSGSGGLLAGRAHRHPDRDAVGLPGYGWAVLGNS

SEQ ID NO: 293 - DNA, 1968 bp, Arthrobacter sp. FB24
  CDS (1)..(1968): transl_table=11
atgccggcattcctcccgccctgccccctcccgcaccacgacggttcgccgcttcatgtgcctcggcgcgccggcctcggcgatgatgccgggctctgcgtgcggatacccgcggcatggggccgtgccgcccgggtctgggtgcggtcggtccaggacggtgaaccccggtacgacgccgcgcgcagcctgggggagcttgacggctgggtttggtgggaagcggaaatgaccgtcaccaacccggtggcccggtaccgcttcctgctggaagtcgcggatagcgagcacgacggcggtactcccggcagcggacagacgggtagtggacatgggggcagcaccccggggtactggagcctcaacgcccagggcctgttccgccgcgacgtctccgactacgcggacttccgcctgaccaccttcccggcagcgccgcagtggctgcgccggggaacgatgtaccaggtgtttccggaccgcttcgcgcgctccgccgacgccggttcgcgtccggtgcctgactgggccataccgtccgcatgggaccacacgcccgtggagggaaccggaccggccacgccgttccagttctacggcggcgacctcaacggggtggccgaaaaactggaccatatccagcaactcggcgccgacgtcatctacctgacacccttcttcccggcacgctccaatcaccgctacgatgcctccaccttcaacgcagtggatccgctcctgggcggcgatgatgccctcgtgacgctggtggaagcggcccatgcccgcgggatcaaagtgatgggcgacctcacggccaaccattcgggcgatgcccacgagtggttccggcaggcgctggccgatcccgcatccgccgaggccggctactactacttcacagggaccgggaaacaaggcgccaccgaagcgggtgccagggcctacgaatcctggtacggcgtcgcctcgctgcccaagctcaactggtcttcagggggcctgacggacaagttcgtcctggacgatgactcgccggtggcgcgctggctcaggcccccgttcaacctggacggctggcggatcgacgtcggcaacatgaccggccggctgggcgccacggacctcaaccgggaggtggcctgcctgatcgcggaccgggtcagggacatcaacccggaagccgcactgctggccgaagccaccaacgatgccgcgccggacttcaccggcgaacactggcacggggccatgacctacgccaacttcacccgcccgctgtggtcctggctggcaggggacgccgcgcacgtcaattttttcggcaccccccttgcgggccccaaccggatgggagccgaggacttcctcgccacccacctggacctggcatcggccttcagctgggatctccggctgcagaacatgaacgccttgaacagccacgacaccgcccgtgcagccacggtgatgatcgacggcgggcagctgcttggggccgtcatgatgttcacgattcccggtgtcccggtggtcttcgccggagacgagtttggcctcaaggggtacaacggcgaagactccaggacgccgatgccgtggaacgacccttcccggattggggcggacctccgtgccagctattcggccatggcagccctgcggcggaagcagccggcgctcaccggaggcggaatccgctggttgcatgccgacggcgacgcgctcgcctatatccgcgagacagcagagagcgcggtcctggtgttcgtggcccgcgcacccgcccgggccgacctcgcggccggcgcactgtctccggcccagttctccgccctcgcggcagatcccgcattctgcacggccgacgtccggaccgatgcggcggcccggagtgccggcacccggatcagcgcgggccaagcagcggccgcggtgtggatacttcccggaacccggacaccgtaa

SEQ ID NO: 294 - protein, 655 aa, Arthrobacter sp. FB24
MPAFLPPCPLPHHDGSPLHVPRRAGLGDDAGLCVRIPAAWGRAARVWVRSVQDGEPRYDAARSLGELDGWVWWEAEMTVTNPVARYRFLLEVADSEHDGGTPGSGQTGSGHGGSTPGYWSLNAQGLFRRDVSDYADFRLTTFPAAPQWLRRGTMYQVFPDRFARSADAGSRPVPDWAIPSAWDHTPVEGTGPATPFQFYGGDLNGVAEKLDHIQQLGADVIYLTPFFPARSNHRYDASTFNAVDPLLGGDDALVTLVEAAHARGIKVMGDLTANHSGDAHEWFRQALADPASAEAGYYYFTGTGKQGATEAGARAYESWYGVASLPKLNWSSGGLTDKFVLDDDSPVARWLRPPFNLDGWRIDVGNMTGRLGATDLNREVACLIADRVRDINPEAALLAEATNDAAPDFTGEHWHGAMTYANFTRPLWSWLAGDAAHVNFFGTPLAGPNRMGAEDFLATHLDLASAFSWDLRLQNMNALNSHDTARAATVMIDGGQLLGAVMMFTIPGVPVVFAGDEFGLKGYNGEDSRTPMPWNDPSRIGADLRASYSAMAALRRKQPALTGGGIRWLHADGDALAYIRETAESAVLVFVARAPARADLAAGALSPAQFSALAADPAFCTADVRTDAAARSAGTRISAGQAAAAVWILPGTRTP

SEQ ID NO: 295 - DNA, 1797 bp, Arthrobacter sp. FB24
  CDS (1)..(1797): transl_table=11
gtgagttttagtccgcaaaacccgagccagcatttcacccccaagggcacgtttgagctcaacgcccccggcctgcaacacgatcccgtctggtaccgcaaagcagtgttctacgaagtcctggttcgcggctttgcggacggaaacggcgacggatccggcgacttccacgggctcatcgacaaactggactacctgcagtggctgggcgtcgactgcctctggctgccgccgttcttccagtcgccgctccgtgacggcggctacgacatctcggactacaactccgtcctggacgagttcggcaccatcagcgacttcaagcggctcgtggccgaggcccatgcccgcggcgtccgcgtaatcatcgacctgccgctgaaccacacctcggaccagcacccgtggttccaggagtcccgcaaggacccggacggaccgttcggcgacttctacgtctggagcgataccgacgagaagtaccaggatgcccgcatcatcttcgtggacaccgaggaatccaactggaccttcgaccccatccggcggcagttcttctggcaccggttcttcagccaccagcccgacctgaactttgagaacccgaaggttatcgacgcccttttcgacgtcgtccggttctggctggaccaggggatcgacggttttcgcgcggacgccatcccgtacctgtacgaggaagagggcaccaactgcgagaacctccccgccacgcacgatttcctgcgcaagctgcggaaaatggtggatgagaactacccgggcagggtcatcattgccgaggccaaccagcctccggtcgaggtggtggagtacttcggcaccgaggaagaacccgagtgccacatggccttccacttccccatcatgccgcgcctctactacgcgctgagggaccagaaagcggcgcccatcatcgagacgatgaaggacaccccggacattcccgaaggcgcccagtggggtaccttcctgcggaaccacgacgaactcaccctggaaatggtcaccgccgacgaacgcgcggccatgctcggctggtacgcaccggacccccgcatgcgcgccaacatcggcatccgccgaaggctggcgccgctgctggataattccaggtccgagattgagctcatcaatgccctgctgctttctctgccggggagcccgttcctgtactacggggatgaaatcggcatgggcgacaacatctggcttgaggaccgcgacgccgtccgcactcccatgcagtggaaccctgaccggaacgcgggcttctcgcacgcggatccgggcaagctctacctgccggtcatccagtcgctggtgtacaactacggcatggccaatgtggaggccgaggccgcgcactccggatcgctgctccgttggacccggcagatcctcagcgtccgtaagaaccaccccgtcttcgggcttggcacgttcaagcacgtcgaggcagatcacgacgtcgtgcttgcttacctgcgggaactggccccggacaatgcggcgggtgaagacgccgaatcgatcctgtgcgcgttcaacctctcgcagcatcccgtggccaccacgctgcggattccgcagtacgccggccgcggcctccgggacgtcttcggcggccagccgttccccgccatcggcgacgacgggcgtcttacgctgacgctcggcagccatgatttcttctggctgcggatccgttccgctgcttccaacccggcctcgccgttcacccaggccatgccggtcctgtccatcgaaggctga

SEQ ID NO: 296 - protein, 598 aa, Arthrobacter sp. FB24
MSFSPQNPSQHFTPKGTFELNAPGLQHDPVWYRKAVFYEVLVRGFADGNGDGSGDFHGLIDKLDYLQWLGVDCLWLPPFFQSPLRDGGYDISDYNSVLDEFGTISDFKRLVAEAHARGVRVIIDLPLNHTSDQHPWFQESRKDPDGPFGDFYVWSDTDEKYQDARIIFVDTEESNWTFDPIRRQFFWHRFFSHQPDLNFENPKVIDALFDVVRFWLDQGIDGFRADAIPYLYEEEGTNCENLPATHDFLRKLRKMVDENYPGRVIIAEANQPPVEVVEYFGTEEEPECHMAFHFPIMPRLYYALRDQKAAPIIETMKDTPDIPEGAQWGTFLRNHDELTLEMVTADERAAMLGWYAPDPRMRANIGIRRRLAPLLDNSRSEIELINALLLSLPGSPFLYYGDEIGMGDNIWLEDRDAVRTPMQWNPDRNAGFSHADPGKLYLPVIQSLVYNYGMANVEAEAAHSGSLLRWTRQILSVRKNHPVFGLGTFKHVEADHDVVLAYLRELAPDNAAGEDAESILCAFNLSQHPVATTLRIPQYAGRGLRDVFGGQPFPAIGDDGRLTLTLGSHDFFWLRIRSAASNPASPFTQAMPVLSIEG

SEQ ID NO: 297 - DNA, 3327 bp, Azotobacter vinelandii AvOP
  CDS (1)..(3327): transl_table=11
atggatcaatcgctcaagtccgtcgcctttctcgaggacccgttctggtacaaggacgcggtgatctaccaggtgcacgtcaagtcgttcttcgactcgaacaacgacggcatcggtgatttcccggggctgatcgccaagctggactacatcgccgacctgggggtcaacaccatctggctgctgccgttctacccttcgccgcgtcgcgacgacggctacgacatcgccgaataccgcggcgtgcatccagactacggcagcctcgccgacgtgcgacgcctcatcgccgaggcgcaccggcgcggcctgcggttgatcaccgaactggtgatcaaccacacctccgaccagcatccctggttccagcgggcgcggcaggccaggaagggctcggcggcgcgcaacttctacgtctggtcggatagcgacgacaagtaccgggacacccggatcatcttcctcgataccgagaagtccaactggacctgggacccggtggccggccagtacttctggcaccgcttctattcgcaccagccggatctcaacttcgacaacccgcaggtgatgaaggcggtgctcggcatcatgcgctactggctcgatctgggcgtcgacggtctgcgcctggacgccattccctacctgatcgagcgcgacggcaccaataacgagaacctgcccgagacccaccaggtgctcaagcgcatccgcgccgagctggatgcccgctatccggaccgcatgctgctggccgaggccaaccagtggccggaggacactcagctctacttcggcggcgccccggaggggaagggcgacgaatgccacatggccttccacttcccgctgatgccgcgcatgtacatggccatcgcccaggaagaccgcttcccgatgaccgacatcctgcgccagaccccggacatcccgtccgactgccagtgggcgatcttcctgcgcaaccacgacgaactgaccctggagatggtcaccgaccgcgagcgcgactacctgtggaacttctacgccgccgaccgccgcgcgcggatcaacctggggatacgccggcgcctggcgccgctgctggagcgcgaccggcggcgcatcgaactgctcaacagcctgctgctgtcgatgccaggtacgccggtgatctactacggcgacgagatcggcatgggcgacaacatctacctgggcgaccgcgacggggtgcgcacgcccatgcagtggagcaccgaccgcaacggcggcttttcccgcgccgatccggccggactggtgctgccgccgatcatggacccgctgtacggcttccagagcgtcaacgtcgaagcccagcagcgcgacagctactcgctgctcaactggacccggcgcatgctcgccgtacgcaagcagcagaaggccttcggccgcggctcgctgcggctgctggcgccggccaaccggcgcatcttcgcctacctgcgcgaataccatggcgcggacggcagcagcgagaccatcctctgcgtggccaacgtctcgcgctcggcccaggcggtggaactggaactgccccagttcgccgacatggtgccggtggagatgaccggcggcagcgccttcccgccgatcggccagttgccctacctgctgaccctgccgccctacggcttctgctggttcctgctggcgcccgcgtcgcagatgcccagttggcacatcaagcccaccgaaggcatgccggaattccagaccctggtgctgcggcgtctcgacgatctgctggtggaccccaaccggcgcatcctggagaaggaggtgttgccggcctacctgcccaagcgtcgttggttcgccggcaagggcgcgccctcgggcaacgtgcacatcgcctatacggtgaccttcggcaatctgccgcgccccgtgctgctcagcgagatcgaggtcggcggcgagggcggcccgcagcgctaccagttgccgctgggttttctccccgaggaggagttcggcagcgccttgccccagcaactggccatgacccgggtgcgccgtggccggcgggtgggcctgttgaccgatgccttcaccctggagggcttcgtccgcgcgacggtccaggcgctgcgcgagcgccgcgtgctggccttcgagcagggcgagctgcgctttctgcccaccgcgcaactggacaaggtcgagctgccggccgacgccgaggtgcgctacatctccgccgagcaatccaacagctcggcggtgcttggcaacgccctggtgctcaagctgatccgccgggtgtccgtcggcgtgcatcccgaactggagatgggcctgcacctcaccggatacggcttcgccaacatcgccagcgtgctcggcgaggtgtgtcgggtcgatgcccagggcggctgcaccgtgctgatgatcctgcagcgctacctggagaaccagggcgacgcctgggagtggacgcagaacaccctcgaccgggccatccgcgacgaactggccggcggcgagtcgaccctggagagccagtacagcgcgctgcacgagctggagagcttttcccgccagctcggccagcgcctcggcgagatgcacatggccctggccgcgcccaccgaggacccggatttcgctcgcgaaaccgccggtcccgagcaagcggcgcagtggaccgagagcatcggcgcgcaactggggcgggccctggaaatcctcgcccagcgccaggcgacgctggccgaggaggaacgggccgccgtcgagcagttgctgctgcagcgtgatgccctgctggagaaagtcggcgaactggccggggcctgcgtcggcagcctgcgcatccgcgtgcatggcgatctgcacctcggccaggtgctggtggtgcagggcgacgcctatctgatcgacttcgagggcgagccgtcgcggccgctcgccgcgcgccgcgccaagcacagcccttacaaggacgtcagcggcgtgctgcgctcgatcggctacgccgccgacatggccatgcgcaacgcgcagagtgtcgacagctccgaggcggccgaccaggcccgtcggcgcatcgcctcgctgtaccaggcgaacgcccgccaggccttcctcgccgcctaccgccaggcggcggccgagatcggccatgcctgggccgtgccggacggcgaggaggccgcgctggcgctgttcagcctggaaaagaccgcctacgaaatcgcctacgaggccgaaaaccgccccgcctggctggccgtaccgctgcggggcctggcgaatctggcgcaacagctactggatggagaggcgcaatga

SEQ ID NO: 298 - protein, 1108 aa, Azotobacter vinelandii AvOP
MDQSLKSVAFLEDPFWYKDAVIYQVHVKSFFDSNNDGIGDFPGLIAKLDYIADLGVNTIWLLPFYPSPRRDDGYDIAEYRGVHPDYGSLADVRRLIAEAHRRGLRLITELVINHTSDQHPWFQRARQARKGSAARNFYVWSDSDDKYRDTRIIFLDTEKSNWTWDPVAGQYFWHRFYSHQPDLNFDNPQVMKAVLGIMRYWLDLGVDGLRLDAIPYLIERDGTNNENLPETHQVLKRIRAELDARYPDRMLLAEANQWPEDTQLYFGGAPEGKGDECHMAFHFPLMPRMYMAIAQEDRFPMTDILRQTPDIPSDCQWAIFLRNHDELTLEMVTDRERDYLWNFYAADRRARINLGIRRRLAPLLERDRRRIELLNSLLLSMPGTPVIYYGDEIGMGDNIYLGDRDGVRTPMQWSTDRNGGFSRADPAGLVLPPIMDPLYGFQSVNVEAQQRDSYSLLNWTRRMLAVRKQQKAFGRGSLRLLAPANRRIFAYLREYHGADGSSETILCVANVSRSAQAVELELPQFADMVPVEMTGGSAFPPIGQLPYLLTLPPYGFCWFLLAPASQMPSWHIKPTEGMPEFQTLVLRRLDDLLVDPNRRILEKEVLPAYLPKRRWFAGKGAPSGNVHIAYTVTFGNLPRPVLLSEIEVGGEGGPQRYQLPLGFLPEEEFGSALPQQLAMTRVRRGRRVGLLTDAFTLEGFVRATVQALRERRVLAFEQGELRFLPTAQLDKVELPADAEVRYISAEQSNSSAVLGNALVLKLIRRVSVGVHPELEMGLHLTGYGFANIASVLGEVCRVDAQGGCTVLMILQRYLENQGDAWEWTQNTLDRAIRDELAGGESTLESQYSALHELESFSRQLGQRLGEMHMALAAPTEDPDFARETAGPEQAAQWTESIGAQLGRALEILAQRQATLAEEERAAVEQLLLQRDALLEKVGELAGACVGSLRIRVHGDLHLGQVLVVQGDAYLIDFEGEPSRPLAARRAKHSPYKDVSGVLRSIGYAADMAMRNAQSVDSSEAADQARRRIASLYQANARQAFLAAYRQAAAEIGHAWAVPDGEEAALALFSLEKTAYEIAYEAENRPAWLAVPLRGLANLAQQLLDGEAQ

SEQ ID NO: 299 - DNA, 3414 bp, Burkholderia vietnamiensis G4
  CDS (1)..(3414): transl_table=11
atgatgaaacgcgaagattccctcgacgacgtgcgccgcgcgcagttcgcgtccgtcgcaccggccggcaccgcgcgcgcgcgccgcgcgcggcgccgcgagcccgcgctgagcacggacgatccgctgtggtacaaggacgcgatcatctatcaggtgcacgtgaagtcgttctacgactccaacaacgacgggatcggcgacttccccggcctgatcatgaagctcgactacatcgccgagctgggcgtcgacacgatctggctgctgccgttctatccgtcgccgcgccgcgacgacggctacgacatcgccgactatcgcggcgtgcatccggactacggcacgctcgccgacgtgcgccgcttcatccgcgaggcgcatgcgcgcggcatccgcgtgatcgccgagctggtgatcaaccacacgtccgaccagcacccgtggttccagcgcgcgcggcgcgccaagcccggctcgacgcatcgcgactactacgtgtggtccgacaccgacacgaagtacgcgggcacgcgcatcatcttcctcgatacggaaacctcgaactggacccacgatccggtcgccggccagtactactggcaccgcttctactcgcaccagccggacctgaacttcgacaacccggccgtcgtgcgcgaggtgatccaggtgatgcgcttctggctcgacctcggcatcgacgggctgcggctcgacgcggtgccgtatctggtcgagcgcgaaggcaccaacaacgagaacctgcccgagacgcacgcgatcctgaagcggatccgcgcgacgatcgacgccgagtatccgaaccgcatgctgctcgcggaagcgaaccagtggccggaagacgtgcaggagtatttcggcaacgaggacgaatgccacatggcgttccacttcccgctgatgccgcgcatctacatgtcgatcgcgagcgaggaccgcttcccgatcctcgacatcatgcggcagacgccggcgctcgcgccgagcaaccagtgggccgtgttcctgcgcaatcacgacgagctgacgctcgagatggtgaccgactccgagcgcgacctgctgtggcagacctacgcgagcgaccggcgcgcgcggctgaatctcggcattcgccgccgcctcgcgccgctgatggagcgcgaccggcgccgcatcgagctgatcaactcgctgctgctgtcgatgcccggcacgccggtgatctactacggcgacgagctcgggatgggcgacaacatccacctcggcgaccgcgacggcgtgcgcacgccgatgcaatggtcgtcggaccgcaacggcggcttctcgcgcgccgatccggaattgctggtgctgccgcccgtgatgggctcgctgtacggctatgacgcgatcaacgtcgaggcgcagacgcgcgacccgcactcgctgctgaactggacccgccgcattctcgcgacgcgccgcgcgacccaggtgttcggccgcggcacgatccgcttcctgcgccccgagaaccgcaaggtgctcgcctacctgcgcgagctggacggccacgagccggtgctgtgcgtcgcgaacctatcgcgcgcgtcgcaggcggtcgagctcgatctgtccgaattcgcgggccgcgtgccgatcgagatgacgtcggactcgccgttcccgccgatcgggcagctcacctacctgctgacgtttccgccgtacggcttcctgtggttcgtgctgtccgagcacggccgcgagccgtcgtggcggcagccgcaggccgagccgctgcccgagtacgtgacgatcgtgatgcggcgcggcgagcagcggcccgacgtcggccagctgcatacgctcgcgcacgacgcgctgtcgtcgtggctcacgcggcgccgctggttcgcgtcgaaggaccgcaagatcggcgacgcgcggctgaacgtcgtcacgccgatgcctgacgagccgttccagtatgcggaggcatgggtgacgacccacggcggcgacgtcgaacgctacgtggtgccgctcgcggccgcatggggcggcgaaacgtcgaacccgctgttcgcgcagctcgcgctcgcgcgcgtgcggcgcggccacacggtcggctatctgaccgacgcgttcgcgctgccggccttcgggcgcgggatgttgcggatgctgcgcgacggcgcgaccgtgccgacttccgacggcggccgcctcgagttcctgcccgagcaggcgctcgccgcgctcgatcccggcgacgatgccgaagtgcgctggctcgccgccgagcagagcaacagctcgctcgtgatcggcgatgcgatcgtgctgaagctggtgcgcaaggtcgcgcacggcgtgcatccggaggcggagatgagccgttacctgacgcggatcggctatgcgaacaccgcgacgctcgccggcgaggtcgtgcacgtcgatcccgacggcacgccgcacacggtcgcgatcctgcaacgctacgtcgacaaccagggcgacgcgtggacgcgctcgttcgacttcctcaagcgcgcgatcgacgagctggcgctgccggccgtcggcgacggcgagcccgcggagcgcgacggcgagcccgatgcgctgctcggctacgcggcgttcgcgggcgtcgtcggcacgcggctcggcgagttgcacgtcgcgctcgcgcagccgtcggacgacgccgcgttcgcgccggagcgcgcgacgcccgagcacgtcgacggctggtgcgtcgacgcgattgcctcgttcggccatgcgctcgacgtgctggccacgcggctcgacgcgctcgacccgagcgcccgcgacgcggccgagacgctgctcgcgtcgcgcgacgcggccgtgcaggcgctcggcgcgctggtgccgcgcacgctcgacgcggtctgcacgcgcatccacggcgacttccatctcggccaggtgctcgacgtgcagggcgacgcgctgctgatcgatttcgaaggcgagccggcgcgcgcgctcgagcgccgccgcgcgaagtcgcatccgctgcgcgacgtcgccggcttgctgcgttcgctgtcgtacgtgagcgcgaccgcgcagttcgcgatcgagaaggtgccgccgcaggcggccggccgcaagcgcgcgttgttcgaccgcttcgggcaggcagccgcggaccgcttcgtcgagtgctatcgcgcggcggccgagcatgcgccggaacgcttcgtcgatccgcgctacgccgatcgcctgctcgcgctgttcctgatcgacaaggcgtcgtacgagctctgctatgaagccgcgaaccgccccgactggctcggcgtgccggtcggcgggctcgccgcgctcgtcgaacgcctgctggacgcgcacgccgcgtccgaccacggaggcacccgatga

SEQ ID NO: 300 - protein, 1137 aa, Burkholderia vietnamiensis G4
MMKREDSLDDVRRAQFASVAPAGTARARRARRREPALSTDDPLWYKDAIIYQVHVKSFYDSNNDGIGDFPGLIMKLDYIAELGVDTIWLLPFYPSPRRDDGYDIADYRGVHPDYGTLADVRRFIREAHARGIRVIAELVINHTSDQHPWFQRARRAKPGSTHRDYYVWSDTDTKYAGTRIIFLDTETSNWTHDPVAGQYYWHRFYSHQPDLNFDNPAVVREVIQVMRFWLDLGIDGLRLDAVPYLVEREGTNNENLPETHAILKRIRATIDAEYPNRMLLAEANQWPEDVQEYFGNEDECHMAFHFPLMPRIYMSIASEDRFPILDIMRQTPALAPSNQWAVFLRNHDELTLEMVTDSERDLLWQTYASDRRARLNLGIRRRLAPLMERDRRRIELINSLLLSMPGTPVIYYGDELGMGDNIHLGDRDGVRTPMQWSSDRNGGFSRADPELLVLPPVMGSLYGYDAINVEAQTRDPHSLLNWTRRILATRRATQVFGRGTIRFLRPENRKVLAYLRELDGHEPVLCVANLSRASQAVELDLSEFAGRVPIEMTSDSPFPPIGQLTYLLTFPPYGFLWFVLSEHGREPSWRQPQAEPLPEYVTIVMRRGEQRPDVGQLHTLAHDALSSWLTRRRWFASKDRKIGDARLNVVTPMPDEPFQYAEAWVTTHGGDVERYVVPLAAAWGGETSNPLFAQLALARVRRGHTVGYLTDAFALPAFGRGMLRMLRDGATVPTSDGGRLEFLPEQALAALDPGDDAEVRWLAAEQSNSSLVIGDAIVLKLVRKVAHGVHPEAEMSRYLTRIGYANTATLAGEVVHVDPDGTPHTVAILQRYVDNQGDAWTRSFDFLKRAIDELALPAVGDGEPAERDGEPDALLGYAAFAGVVGTRLGELHVALAQPSDDAAFAPERATPEHVDGWCVDAIASFGHALDVLATRLDALDPSARDAAETLLASRDAAVQALGALVPRTLDAVCTRIHGDFHLGQVLDVQGDALLIDFEGEPARALERRRAKSHPLRDVAGLLRSLSYVSATAQFAIEKVPPQAAGRKRALFDRFGQAAADRFVECYRAAAEHAPERFVDPRYADRLLALFLIDKASYELCYEAANRPDWLGVPVGGLAALVERLLDAHAASDHGGTR

SEQ ID NO: 301 - DNA, 3414 bp, Burkholderia cenocepacia HI2424
  CDS (1)..(3414): transl_table=11
atgatgaaacgcgaagattccctcgacgacgtgcgccgcgcgcaattcccgtcgctcgcgccggccggcacgccgcgccggcgccgcgcgcgccgccgcgaacccgcgctctgcgcggacgatccgctgtggtacaaggacgcgatcatctaccaggtgcacgtgaagtcgttctacgactcgaacaacgacggcatcggcgatttccccggcctgatcgcgaagctcgactacatcgccgaactcggtgtcgacacgatctggctgctgccgttctatccgtcgccgcgccgcgacgacggctacgacatcgccgattaccgcgacgtgcatcccgactacggcacgctggccgacgtgcggcgcttcatccgcgaggcgcatgcgcgcggcatccgcgtgatcgcggagctcgtgatcaaccacacgtcggaccagcatccgtggttccagcgcgcgcgccgcgcgaagccgggctccacgcatcgcgactactacgtgtggtccgacaccgacacgaaatacgcgggcacgcggatcatctttctggataccgaaacgtcgaactggacccacgacccggtggccggccagtactactggcaccgcttctactcgcaccagccggacctgaacttcgacaacccggccgtcgtgcgcgaagtgatccaggtgatgcgcttctggctcgacctcggcatcgacgggctgcggctcgacgcggtgccgtatctcgtcgagcgcgaaggtaccaacaacgagaacctgcccgagacgcatgcgatcctgaagcggattcgcgcgacgatcgacgccgagtacccgaaccggatgctgctcgcggaagcgaaccagtggccggaagacgtgcaggaatacttcggcaacgaggacgaatgccacatggcgttccacttcccgctgatgccgcgcatctacatgtcgatcgcgagcgaggatcgcttcccgatcctcgacatcatgcggcagacgccggcgctcgcgccgagcaaccagtgggccgtgttcctgcgcaaccacgacgagctgacgctcgagatggtcaccgattcggagcgcgacctgctgtggcagacctatgcgagcgaccgccgcgcgcggctgaacctcggcatccggcgccggctcgcgccgctgatggagcgcgaccggcgccgcatcgagctgatcaattcgctgctgctgtcgatgcccggcacgccggtgatctactacggcgacgaactcgggatgggcgacaacatccacctcggcgaccgcgacggcgtgcgcacgccgatgcagtggtcgtcggaccgcaacggcggcttctcgcgcgccgaccccgaactgctggtgctgccgccggtgatgggctcgctgtacggctatgacgcgatcaacgtcgaggcgcagacgcgcgatccgcactcgctgctgaactggacccgccgcatcctcgcgacgcgccgcgcgtcgcaggcgttcgggcgcggcacgatccgcttcctgcgcccggagaaccgcaaggtgctcgcgtacctgcgcgagctggacggccacgagccggtgctgtgcgtcgcgaacctgtcgcgcgcgtcgcaggcggtcgaactcgacctgtccgaattcgcgggccgtgtgccgatcgagatgacgtccgattcgccgtttccgccgatcggccagctcccgtatctcctcaccttcccgccgtacgggttcctgtggttcgtgctcgccgagcatggccgcgagccgtcgtggcggcagccgcatgcggagccactgcccgaatacgtgacgctcgtgatgcggcgcggcgatacgcggccagacgtctcgcaactgcacgcgctggcgcacgacgcgctcgcgtcgtggctcgcacggcggcgctggttcgcatcgaaggatcgcaagatcggcgacgcgtggctgaacgtcgtcacgccgattccggacgagccgttccagtatgcggaggcgtgggtgtccgcgagcgacggcggcgtcgagcgctacgtggtgccgctcgcgaccgcgtggggcggcgagacgtcccatccgctattcgcgcaactggcgctggcgcgcgtgcggcgcggccatacggtcggctacctgaccgatgcgttcgcgctgccggcgttcgcgcgcgggatgctgcgcaagctgcgcgacggcgcgacggtgcccacgtccgacggcggccggctcacctttctcccggaagacgcgctcgccgggctcgatccgggcgacgacgcggaagtgcgctggctcgcggccgagcagagcaacagttcgctcgtgatcggcgacgcgatcgtgctgaagctggtgcgcaaggtcgcgcacggcattcatccggaagcggaaatgagccggcacctgacgcgcatcggctatgcgaacactgcgacgctggtcggcgaagtcgtgcacgtcgacccggacggcacgccgcatacggtcgcgatcctgcagcgctacgtcgacaaccagggcgacgcgtggacgcgctcgttcgacttcctgcgccgcgcgatcgacgagctggcgctgccggccgcggacgaaggcgaggcggccgaaacggacgaggaacccgacgcactgctcggctacgcggcgttcgccggcatcatcggcacgcggctcggccagttgcacgtcgcgctcgcgcagccgtccgacgatcccgcgttcgcaccggagcgcgcgacgcccgatcacgtcgacggctggtgcgtggacgcgatcgcgtcgttcgaacgcgcgctcgacgtgctgcgcacgcggctcgacgcgctcgatgcgcccacccgcgcgtcggccgacgcgctcctcgcatcgcgcgacgcggccgtcgaggcgctcggcgaactggtgccgcgcacgctcgacgcgcaatgcacgcggattcacggcgattttcatctgggccaggtgctcgacgtgcagggcgacgcgctgctgatcgacttcgaaggcgaaccggcgcgcccgctcgagcggcgtcgcgcgaaatcgcatccgctgcgtgacgtggccggcctgctgcgctcgctgtcgtacgtgagcgcgaccgcgcagttcgcaatcgagaaggcgccgccgcaagcggccggccgcaagcgtgcgctgttcgaccgcttcggacaggccgccgccgaccgcttcgtcgaatgctatcgcgcggcggccgacctcgcgcccgcgcgcttcgtcgatccgcactatgcggaccgcctgctcgcgctgttcctgatcgacaaggcgtcgtacgagctgtgctacgaagccgcgaaccggcccgactggctgagcgtgccggtcggcgggctcgcggcgctggtcgaccggctgctcggcgacggcgcgctgcccgacgacggaggaaacccatga

SEQ ID NO: 302 - protein, 1137 aa, Burkholderia cenocepacia HI2424
MMKREDSLDDVRRAQFPSLAPAGTPRRRRARRREPALCADDPLWYKDAIIYQVHVKSFYDSNNDGIGDFPGLIAKLDYIAELGVDTIWLLPFYPSPRRDDGYDIADYRDVHPDYGTLADVRRFIREAHARGIRVIAELVINHTSDQHPWFQRARRAKPGSTHRDYYVWSDTDTKYAGTRIIFLDTETSNWTHDPVAGQYYWHRFYSHQPDLNFDNPAVVREVIQVMRFWLDLGIDGLRLDAVPYLVEREGTNNENLPETHAILKRIRATIDAEYPNRMLLAEANQWPEDVQEYFGNEDECHMAFHFPLMPRIYMSIASEDRFPILDIMRQTPALAPSNQWAVFLRNHDELTLEMVTDSERDLLWQTYASDRRARLNLGIRRRLAPLMERDRRRIELINSLLLSMPGTPVIYYGDELGMGDNIHLGDRDGVRTPMQWSSDRNGGFSRADPELLVLPPVMGSLYGYDAINVEAQTRDPHSLLNWTRRILATRRASQAFGRGTIRFLRPENRKVLAYLRELDGHEPVLCVANLSRASQAVELDLSEFAGRVPIEMTSDSPFPPIGQLPYLLTFPPYGFLWFVLAEHGREPSWRQPHAEPLPEYVTLVMRRGDTRPDVSQLHALAHDALASWLARRRWFASKDRKIGDAWLNVVTPIPDEPFQYAEAWVSASDGGVERYVVPLATAWGGETSHPLFAQLALARVRRGHTVGYLTDAFALPAFARGMLRKLRDGATVPTSDGGRLTFLPEDALAGLDPGDDAEVRWLAAEQSNSSLVIGDAIVLKLVRKVAHGIHPEAEMSRHLTRIGYANTATLVGEVVHVDPDGTPHTVAILQRYVDNQGDAWTRSFDFLRRAIDELALPAADEGEAAETDEEPDALLGYAAFAGIIGTRLGQLHVALAQPSDDPAFAPERATPDHVDGWCVDAIASFERALDVLRTRLDALDAPTRASADALLASRDAAVEALGELVPRTLDAQCTRIHGDFHLGQVLDVQGDALLIDFEGEPARPLERRRAKSHPLRDVAGLLRSLSYVSATAQFAIEKAPPQAAGRKRALFDRFGQAAADRFVECYRAAADLAPARFVDPHYADRLLALFLIDKASYELCYEAANRPDWLSVPVGGLAALVDRLLGDGALPDDGGNP

SEQ ID NO: 303 - DNA, 1614 bp, Chromohalobacter salexigens DSM 3043
  CDS (1)..(1614): transl_table=11
atgaaggacaacactttctggtggcgcggtggtgtcatctaccaaatctatccgcgcagctttctggacagcaacggcgacggtatcggcgacctgccgggcatcatcgaaaagctcgattacgtggcgtcgctcggtgtcgatggcatctggctgtcgcctttctttacatctccgatggcggattttggctacgacatcagcgattatcgcgacgtcgaccccatgttcggcaccctggacgacttcaagtcactgctcagtcacgcccatgctctggggctcaaggtgatcatcgatcaagtgatcagccatacgtcggaccagcatccctggtttcaggaaagtcgtcgcgaccgacaaaatgctcgtgccgattggtacgtatgggccgaccccaagcccgacggcacgccgcccaacaactggctgtctatctttggcggttcggcgtggacattcgactcgcgacgtcgtcagtattacctgcataatttcctgatcgagcagccggatcttaattttcataatccggccgtgcgtgacgctcagctcgacaacatgcgcttttggctggaacttggtgtcgatggctttcgcctggataccgtcaacttctatttccatgatgccgaactgcgcgacaacccggctatcgagcccggcgatacaaagacgctgggtgctccggaggccaacccttacacgtggcaacgccatgtccatgacataagccgccccgaaaacctcgacttcctcaaacgattacgcgcgttgatggatgagtttccgggcacggcgacggtcggtgagatcagcgaagatagtccactcgagcgcatggcggagtacaccgccaatggtgacaagctgcacatggcctacaccttcgatctgcttaatgcaccgcgctccccggcctacattcatgaggtgattgaacgcttccagcgactggcgggcgatgcctggccttgctgggcactgtccaaccacgatgtgatgagaagcgccacgcgctggggagccgaggaagacgccgaggcgtatcccaaggtcacgttggccatgctcttgtcattgcgcggcagcgtttgcctttatcaaggtgaggaactcggtctgcccgaggccgaagtgcctttcgagcgtattcaggacccctacggcaaggtcctttggcctgacttcaagggacgtgacggctgccggacgccgatgccctggcatgacggtattcatggcggtttttcgcgtgtcgagccttggttgccggtggatgcccgccacctgcagcgtgctgtgtcgcgtcagcaggcgagtctcgattccatgctcaacagcgtgcgggcgctgatcgcatttcgtcacgaccacccggcgctgttcgacggtgacctgcgattgctcgatgtcggcgatgccctgcttggcttcgttcgtgagcatgctcaggaacgccttgtgtgcgtgttcaacctgactgaccaggcgcaggcgtgttgcctgcccgagccagggcacctgctagacgctcccgggttcacggcgcacgtggaaaacgaccgcttgaccctgccggcctatcaggcggcctatctgcgccttgactga

SEQ ID NO: 304 - protein, 537 aa, Chromohalobacter salexigens DSM 3043
MKDNTFWWRGGVIYQIYPRSFLDSNGDGIGDLPGIIEKLDYVASLGVDGIWLSPFFTSPMADFGYDISDYRDVDPMFGTLDDFKSLLSHAHALGLKVIIDQVISHTSDQHPWFQESRRDRQNARADWYVWADPKPDGTPPNNWLSIFGGSAWTFDSRRRQYYLHNFLIEQPDLNFHNPAVRDAQLDNMRFWLELGVDGFRLDTVNFYFHDAELRDNPAIEPGDTKTLGAPEANPYTWQRHVHDISRPENLDFLKRLRALMDEFPGTATVGEISEDSPLERMAEYTANGDKLHMAYTFDLLNAPRSPAYIHEVIERFQRLAGDAWPCWALSNHDVMRSATRWGAEEDAEAYPKVTLAMLLSLRGSVCLYQGEELGLPEAEVPFERIQDPYGKVLWPDFKGRDGCRTPMPWHDGIHGGFSRVEPWLPVDARHLQRAVSRQQASLDSMLNSVRALIAFRHDHPALFDGDLRLLDVGDALLGFVREHAQERLVCVFNLTDQAQACCLPEPGHLLDAPGFTAHVENDRLTLPAYQAAYLRLD

SEQ ID NO: 305 - DNA, 3396 bp, Burkholderia pseudomallei S13
  CDS (1)..(3396)
atgaagcccgcagacacgctcgaagacgtcggccgcgcgcagttcgtcgcgcacatggcccgaaggccgcgcggcgcgcgcaggcgagaggcgccgggcgtcgccgacacgccgctgtggtacaaggatgcgatcatctaccaattgcacgtgaagtcgttcttcgacgccaacaacgacggcgtcggcgatttcgccggcctgatcgcgaagctcgactacatcgcggagctcggcgtcgacacggtgtggctgctgccgttctatccgtcgccgcgccgcgacgacggctacgacatcgccgactaccgcggcgtgcatcccgactacggcacgctcgcggacgtgcgccgcttcatccgcgaggcgcacgcgcgcgggctgcgggtgatcaccgagctcgtgatcaaccacacgtcggatcagcatccgtggttccagcgcgcccggcgcgcgaagcgcggctccgtccaccgcgactactacgtgtggtccgacaccgatctcaagtacgcgggcacgcggatcatcttcctcgataccgagacgtcgaactggacgcacgatccggtcgcgggccagtactactggcatcgcttctattcgcatcagcccgacctgaacttcgacaatccggccgtggtgcgcgaagtgctgcagatcatgcgcttctggctcgatctcggcatcgacgggctgcggctcgacgcggtgccctacctcgtcgagcgcgagggcacgagcaacgagaacctgccgcagacgcacgcgatcctcaagctgatccgcgcgacgatcgacgccgagtacccgaaccggatgctgctcgccgaagcgaaccagtggcccgaggacgtccaggaatatttcggcgacgaggacgagtgccacatggccttccacttcccgctgatgccgcgcatctacatgtcgatcgcgagcgaggaccgctttccgatcatcgacatcatgcggcagacgcccgccctcgcgccgagcaatcaatgggcggtgttcctgcgcaaccacgacgagctcacgctcgagatggtcaccgattcggagcgcgacctgctctggcaagcctacgcgagcgagcgccgcgcgcggctgaacctcggcatccgccgccggctcgcgccgctgatggagcgcgaccgccgcaggatcgagctgatcaactcgatcctgctgtcgatgcccggcacgcccgtcatctactacggcgacgagctcggcatgggcgacaacctgcacctcggcgatcgcgacggcgtgcgcacgccgatgcaatggtcgtcggaccgcaacggcggcttctcgcgcgccgatcccgagctgctcgtgctgcctccggtgatgggcacgctgtacggctacgacgcgatcaacgtcgaggcgcagacgcgcgatccgcattcgctgctgaactggacgcggcgcatcctgtcgacgcgccgcgcgacgcgcgtgttcggacgcggcgcgatccgcttcctgcgcccgggcaaccgcaagatcctcgcgtatctgcgcgagctcgacggcgaaacgccggtgctctgcgtcgcgaacctgtcgcgcgcgtcgcaggcggtcgagctcgacctgtcggaattcgccggctgcgtgccgaccgaaatgacgtcggactcgccgttcccgccgatcggccaactgccgtatctgctgacgttcccgccgtacggcttcctgtggttcgcgctgtccgagcacggccgcgagccggcctggcatcagcagtacgccgagccgctgcccgaatacctgacgctcgtgatgcggcgcggcgagacgcagccgggcgccgcgctgctcgacacgctcgcgcaggacgcgctgccgtcatggctcgcgcggcggcgctggttcgcatcgaaggagcggcgcgtcgacagcgcgcgcttcgacgcgctcacgccgattccgggcgagccgtttcagtatgcggaggcgcgcgtcgccgtcgacggccgcgaagaacgctacgtggtgccgctcgcgagcgcctggggcagcgagacgcctcagccgctgttcgcgcagctcgcgctcgcgcgcgtgcggcgcggccatacggtcggcctgctgaccgacgcgttcgcgctgccgtcgttcgcgcacggcgtgctgcgccagctgcgcgcgggcgcggccgtgccggtggcgggcggcgggcgtctcgaattccggcccgagccggacctggcgcggctcgatcccggcgatgcgcccggcgtgcggtggttcgccgccgagcagagcaacagctcgctcgtgatcggcgaggcgatcgtgctgaagatcgtgcgcaagctcgccgcgggcgtccacccggaagcggagatgggccggcacctgcggcgcatcggctaccggaacgtcgcgccgctcgtcggcgaggtcgtgcgcatcggcgcggacggcgcgccgcacaccgtcgcgatcctgcaggaatacgtcgacaatcagggcgacgcgtggacgcgctcgtgcgattttctcaagcgcgcgatcgaggagctcgcgctgcccgcggcaaacgacgccgacgcggcggcgccgagcgccgagccggagatgatcgacggctacgcgacgttcgcgggcatcgtcggcaagcggctcggcgaactgcacgcggcgctcgcgcagccgagcgacgatgcggcgttcgcgccgcagcgcgtgtcgcccgcgcgcgtcgacggctggatcggcgatgcgctgggctggttcgaacgcgcggcgagcctgctggccgaacggctcgacacgctcgaaggccaaacgcgcgcggccgccgagctgctcgtcgcgcagcgcgccgcggtggccgaggcgctgcgtgcgctggtgccgcgcgagctcgacggatgctgcatccggattcacggcgacttccacctgggccaggtgctcgacgtgcaaggcgacgcgcttctcatcgatttcgagggcgaacccgcgcgcccgctcgagcagcgccgcgcgcaatcgcatccgttacgcgacgtggccgggttcctgcggtcgctgtcgtacgcgagcgcggccgcgcagttcacgatcgaaaaggcgccgcagcaggccgccgagcgcaagcgcgcgctgttcgagcgcttcgggcaggcggccgcggaccgcttcgttgcgcaataccgcgaagcgctgtcggccgcgtcgcgcgaattcgtcgagccgcgctatgcggaccggctgctcgcgctgttcctcatcgagaaggcgtcctacgagctgtgctacgaagccgcgaaccggccggactggctgagcgtgcccgcaaacggcctcgccgcgctcgtcgcgcgcctgatcggcggcgccgcgccgcagcaggaggacgcgcgatga

SEQ ID NO: 306 - protein, 1131 aa, Burkholderia pseudomallei S13
MKPADTLEDVGRAQFVAHMARRPRGARRREAPGVADTPLWYKDAIIYQLHVKSFFDANNDGVGDFAGLIAKLDYIAELGVDTVWLLPFYPSPRRDDGYDIADYRGVHPDYGTLADVRRFIREAHARGLRVITELVINHTSDQHPWFQRARRAKRGSVHRDYYVWSDTDLKYAGTRIIFLDTETSNWTHDPVAGQYYWHRFYSHQPDLNFDNPAVVREVLQIMRFWLDLGIDGLRLDAVPYLVEREGTSNENLPQTHAILKLIRATIDAEYPNRMLLAEANQWPEDVQEYFGDEDECHMAFHFPLMPRIYMSIASEDRFPIIDIMRQTPALAPSNQWAVFLRNHDELTLEMVTDSERDLLWQAYASERRARLNLGIRRRLAPLMERDRRRIELINSILLSMPGTPVIYYGDELGMGDNLHLGDRDGVRTPMQWSSDRNGGFSRADPELLVLPPVMGTLYGYDAINVEAQTRDPHSLLNWTRRILSTRRATRVFGRGAIRFLRPGNRKILAYLRELDGETPVLCVANLSRASQAVELDLSEFAGCVPTEMTSDSPFPPIGQLPYLLTFPPYGFLWFALSEHGREPAWHQQYAEPLPEYLTLVMRRGETQPGAALLDTLAQDALPSWLARRRWFASKERRVDSARFDALTPIPGEPFQYAEARVAVDGREERYVVPLASAWGSETPQPLFAQLALARVRRGHTVGLLTDAFALPSFAHGVLRQLRAGAAVPVAGGGRLEFRPEPDLARLDPGDAPGVRWFAAEQSNSSLVIGEAIVLKIVRKLAAGVHPEAEMGRHLRRIGYRNVAPLVGEVVRIGADGAPHTVAILQEYVDNQGDAWTRSCDFLKRAIEELALPAANDADAAAPSAEPEMIDGYATFAGIVGKRLGELHAALAQPSDDAAFAPQRVSPARVDGWIGDALGWFERAASLLAERLDTLEGQTRAAAELLVAQRAAVAEALRALVPRELDGCCIRIHGDFHLGQVLDVQGDALLIDFEGEPARPLEQRRAQSHPLRDVAGFLRSLSYASAAAQFTIEKAPQQAAERKRALFERFGQAAADRFVAQYREALSAASREFVEPRYADRLLALFLIEKASYELCYEAANRPDWLSVPANGLAALVARLIGGAAPQQEDAR

SEQ ID NO: 307 - DNA, 1728 bp, Clostridium thermocellum ATCC 27405
  CDS (1)..(1728): transl_table=11
atgaaacttgaggcaatatatcacaaaccttacagcgagtttgcatttcctgttgctcccgacactctggtaatacggctcaggacggctaaaaacgatgtaaacacctgcattctcatctatcatgaaaagtatgatacgtcacaaagaggaaaagtgaaaatggataaagttgcaagcgatggaatgtttgactattacgaggtggagcttaatgtcggtataaagagaattaagtatatgttttatcttgaggataattattcaataaaatggtacagcagcgacggattttttgattatatgcctcagtggggacattttacctattcttatatatgcaaagacgacatatttcatgaggttgaatggtttcgtaattcaacaatatatcagatatttcccgacagatttgcaaagtttccgccggataccgaaaattcgggcaaaagaacgatacatgggggcaatattaaagggataatcgaccggtttgatcatttagtcaaacttggagttgatgtggtttatttaaatcccatattcaaatcggaatcttatcatcgctatgatgttgtcgattattatgaaattgacccgatgtttggaagtaaagaagagctcagggaattgatggacttgtgtcacaaaaacggtataaaagtaatatttgacggagtttttaatcactccggagacaagttttttgcattcagagatgttgtggaaaaaggagaaaaatcaaagtatgcaaactggtattttataaattcttttcccgttcagggatatccaagacccaattatgaatgcttttccttttatggaggaatgccgaagcttaacaccggaaatcctgagacggcaaaatactttcttgatgtggtaaagtattggacagtggagtttggggtggacggatggagacttgatgcggcggatgaggtggaccgaaagttttggagaaagcttagggatatgctgaaagatttgaacaaggatgtggtgctgattggcgaaatatttgacgaggcgtcttcgtggctttggggagaccagtttgactcggtgataaattatccgttgaaagccatgataaatgacctttttgcctataggtccattgatgtggagactttcaggaacagaataagcggctatattatgaagtttaacaaaaaggtgctaagcagcctggtaaatataataagcactcatgacacgccaaggtttttgactctttgcaacggagatgaaaagaggtttgagatggcagtagtgttccagtttacctttcctggagttcccctcatatactacggcgatgaaatagggatggaaggcgaaggagaccctgattgcagaagaccgatgatatgggacgaagcgaaatggaacaaaaaaactctcgagttgtataaattcctgattggcttgaggaagaggttcgatgccttgagaactggagaatatggagaacttcctgtaacaggatgcaatgggatactggcatacagaaggggccggggagaaaacggaattattgttgccatgaatacattggaccgaaaggaaaatgtcgtagtagaaacaggagattcttttgacacggtaaaagcttttgagtctttgaaagacgaagaaagactgaatgttgacaaaaaaaggataaacatatgcttaaatccgtttgagtggaggatttacaaagcctgcggcgaattataa

SEQ ID NO: 308 - protein, 575 aa, Clostridium thermocellum ATCC 27405
MKLEAIYHKPYSEFAFPVAPDTLVIRLRTAKNDVNTCILIYHEKYDTSQRGKVKMDKVASDGMFDYYEVELNVGIKRIKYMFYLEDNYSIKWYSSDGFFDYMPQWGHFTYSYICKDDIFHEVEWFRNSTIYQIFPDRFAKFPPDTENSGKRTIHGGNIKGIIDRFDHLVKLGVDVVYLNPIFKSESYHRYDVVDYYEIDPMFGSKEELRELMDLCHKNGIKVIFDGVFNHSGDKFFAFRDVVEKGEKSKYANWYFINSFPVQGYPRPNYECFSFYGGMPKLNTGNPETAKYFLDVVKYWTVEFGVDGWRLDAADEVDRKFWRKLRDMLKDLNKDVVLIGEIFDEASSWLWGDQFDSVINYPLKAMINDLFAYRSIDVETFRNRISGYIMKFNKKVLSSLVNIISTHDTPRFLTLCNGDEKRFEMAVVFQFTFPGVPLIYYGDEIGMEGEGDPDCRRPMIWDEAKWNKKTLELYKFLIGLRKRFDALRTGEYGELPVTGCNGILAYRRGRGENGIIVAMNTLDRKENVVVETGDSFDTVKAFESLKDEERLNVDKKRINICLNPFEWRIYKACGEL

SEQ ID NO: 309 - DNA, 1461 bp, Crocosphaera watsonii WH 8501
  CDS (1)..(1461): transl_table=11
atggtcataaaaacccctgaatgggtaaaaaacgccattttttatcaaatttatcccgatacctttgcgagaaaggttccagatcgccaaaaatggttattagatgtacccttggaagactgggaagcccccccaacctcccaaggatacaaaggaggcaacctctggggtgtgatcgataaattggattatttacaagatttaggggttgatgctctctatttgacccctatttttcgctctgcttgtaaccatcgctatcatactcaagattattatgcgatcgatcctttattgggagacagagaagcttttgatcacttgttgaaaactgcccatgataaagggtttaaggtggttttagatggggtatttaatcacgctagtcgtggctttttcttttttaacgatatcctggaaaatggaccgaattccccttggttagattggtttaaaatcgaagggtggcctttatctgcctacgatggcagtcgtccggctaattacgtctcctggatagattatcgtgctttaccccagtttaaccacgataacccggcagtgagggaatatatcatgcaagtgggggaatattggttacaacaagggatcgacggttggcggttagatgtacccaactgtgttgaagcagagggtttctgggaggaatttcgagaacgggttaaagctgtcaaccctgaagcctatatcgtcggagaaatcgtttctgatgctactcaatggctagatggcaagcaatttgatggggtgatgaattatccttttgctcgtttaaccgcttgttttgtcatcggcgatcgccttgacaaggagactatccccagtttttataaaccttacgaaaccctcgatgcagccgaatacgcaaagggacttgaggaattattagcccgtcatccttgggaaattcaattaacccagctaaacctacttgatagtcacgatacttctcgttttctaactatggcaggaggcgatcgcacttccttacagttagctacgttattgttgtttacctttcctggcactcccaacatattttatggggatgaaattggtattgaaggtggcaaagatcccgatgggagaaaaggtttccctacagaagaaaagtgggagcaagaaaccttaacctatcataaacaattaatccaaatcaggaaaaaatacacggctttacggacaggagaatatagagttatcactgctcaagaaaatgtctatgtctttgcccgtattttaggagaagaagggttgattattgcagttaataatggagaagataaaacagaaatacaaatagataaattcgacaaagtgtcctcaatattacagactaaaccgagtcagattatttatggagaagggtcaattaattggcatgataaccagttaaaaataacaatgcatcctcgttctggcctagttatagccccttaa

SEQ ID NO: 310 - protein, 486 aa, Crocosphaera watsonii WH 8501
MVIKTPEWVKNAIFYQIYPDTFARKVPDRQKWLLDVPLEDWEAPPTSQGYKGGNLWGVIDKLDYLQDLGVDALYLTPIFRSACNHRYHTQDYYAIDPLLGDREAFDHLLKTAHDKGFKVVLDGVFNHASRGFFFFNDILENGPNSPWLDWFKIEGWPLSAYDGSRPANYVSWIDYRALPQFNHDNPAVREYIMQVGEYWLQQGIDGWRLDVPNCVEAEGFWEEFRERVKAVNPEAYIVGEIVSDATQWLDGKQFDGVMNYPFARLTACFVIGDRLDKETIPSFYKPYETLDAAEYAKGLEELLARHPWEIQLTQLNLLDSHDTSRFLTMAGGDRTSLQLATLLLFTFPGTPNIFYGDEIGIEGGKDPDGRKGFPTEEKWEQETLTYHKQLIQIRKKYTALRTGEYRVITAQENVYVFARILGEEGLIIAVNNGEDKTEIQIDKFDKVSSILQTKPSQIIYGEGSINWHDNQLKITMHPRSGLVIAP

SEQ ID NO: 311 - DNA, 3318 bp, Chlorobium phaeobacteroides BS1
  CDS (1)..(3318): transl_table=11
atgccgcgagcatctgcatcctatcagcctgaaccgctctggtacaaggacgccatcatttatgaggcacatgtaaagactttttttgacagtaacaatgacggtgtcggtgattttgaagggttgcgccagaagctgccctatctggaaagtctcggtataaccgcaatctggctgcttcctttttatccttcacccctgagagatgacggctacgatattgccgattacatggaggtcaatcctgactacggtaccatcgaggatttcaaagcctttctcgatgacgcgcataagctcggactgaaggtgattaccgagcttgtcatcaaccatacgtccgatcagcacgcatggttccagagggccagacaggcagagccgggatcggtcgaacgggatttttacatgtggagcagtgatcccaagaaatactccggcgtccgcatcattttccaggatttcgaggcctcgaactggacatgggaccctgtcgccggagagtattactggcatcggttctatcatcatcagcctgatctgaacttcgaaaatcccgcggttgaaaaagccatttacaaggtgcttgattactggctggagatgggcgtcgacgggttgcggctcgacgcggttccctatctctatgcagaggaaggaaccaactgtgagaaccttccccgcacgcacaagtttctgcagaggctgcgcaagcatgtagacggcaagttcccgaaccgtatgcttcttgccgaggcaaatcagtggccggaagatgccgccgagtatttcggcgaaggtgacgaatgtcatatgaatttccatttccctctgatgccgaggatgtacatggcgctggaaatggaagatcgttttccgatcatagatattctcgaccagacacccgggattccggaagagtgccagtgggcttccttccttcgcaatcatgatgaacttactcttgagatggtgaccgatgaggagcgtgactatatgcgccgggtgtacgcgcatgatccgaaggcgcgcatcaatctcggtatacgccgccgtctggcgccgcttatgtcgaatgaccgcagaaaaatcgagctgatgaacatcatgctcctttccctgcccggcactccggttctctactacggtgacgagataggtatgggcgataatttttacctcggtgatcgtgacggcgttcgtactcccatgcagtggaacggtgaccggaatgcaggtttttccagagccaatccccagcagttgcagctgccggtgatcattgatccggaataccattacgagggagccaatgtcgaggtacaggaaagcaacatcaattcgctgctctggtggacacgccacatgctctccacctcccgcaggtacaaagccctcagtcgcggggatattatctttattcagtctcagaatcctcaggtcctgatttttaccaggacatacaaggatgagaccatgctgtgcatcatcaacctgtcgcgtaacgcacaggcggtcaccatggatctgtcggaatacgaaggatatattcctgaagaggtgttcagcctcagtcattttcccgggatctctgcaaggccgtatacggttacgctgggtccttacggatatttctggttcaagcttgtcaggagtgaagatgagatcgggagccgacgctatatcgacaagccgtttgcgaaagtagccgccatggatgacctcttttccggcaaggttcttgaccgtcttgaatccagagtgctgcctcagtatatacggggttgcagatggtttggcggcaaggcccgcaagatcgtcagggtcagcgtcaacgatagcattcctgtgccagcctgtcaaaacacggtctacctgattgtcgaggtacgctatccgagcggctcgaacgatctgtatcagcttccggtgacatttctgcctacaggagagttcaatcctgacgaagactttttcatgaagcaggttatctgcagtgtgaagatcggagagaacgaggggtatctctgcgatgcgacctatcagaaggagttccatcgtttccttctcgacgttatcatcgccggaaaaggcctgaagggggggattttcaaactgacagccgaaaagggctcgactctggaggagtatctgccgcaggaagaggatgatagtatgaactccgtgattttcggtctggagcagagcaatacgtcgatcatgtatgatgacaagctctgtctgaagctctaccgcaagatctcttcagggatttctcctgaagttgaaatctgccgcaccttgactgaaaagacatcgtttgagagttctccgggctatcttggagcgctttacctttccagaagccgcaaggatacctcttctctgggcatcctgcagaactttatccccaatgagggagatgcctggagccagaccctgcactatgtgcaccgttactatgaagaggtgcttgttctgttgccgcagctcgaagagatcccggaaattcccccgataggaggagagacagtcgagatgccggagatcatgcacgggctgataggtgaaatctacctcgggatggttaacaagcttgctgagcgaacagcagaaatgcatctttctctggcctcgccggatcttggtcctgattttctgcctgaagcatttaccacgctctatcagcgctccatataccagtccatgcgtgaacaggtgaaaagaggtatggtgatgctcaaggagcagatgaaagggatcgcgaaagattataagggaatcgcggctgatctgcttggacgggagcaggagatactggaccggctttcacatatcaaagctcgcaggatcccggcatcaaagatcaggattcatggtgactatcatctcggtcaggtactctggaccggtaaggattttgtgatcattgactttgaaggcgaaccggcacgctctatcagcgagcgcaggatcaagcgtgccgtgttccgtgatcttgcaggaatgatgcggtcgttccattacgctgccttcaacgtcctgatccaggatcgttctataaggcctgaggatgctgaaaagcttgagccatgggcggagttgtggagtttttataccgggcagcatttctatgatgtgtatgcggccgctgttggaggacacggtctgattcctgaaaatattacagaacagcaccttctgcttcgctcctatctcatggacaaggctatttatgaattgaactatgagctgaacaaccgtcctgagtgggtaggcatagccctgaagggtctgcagcggctgctcgaatcctga

SEQ ID NO: 312 - protein, 1105 aa, Chlorobium phaeobacteroides BS1
MPRASASYQPEPLWYKDAIIYEAHVKTFFDSNNDGVGDFEGLRQKLPYLESLGITAIWLLPFYPSPLRDDGYDIADYMEVNPDYGTIEDFKAFLDDAHKLGLKVITELVINHTSDQHAWFQRARQAEPGSVERDFYMWSSDPKKYSGVRIIFQDFEASNWTWDPVAGEYYWHRFYHHQPDLNFENPAVEKAIYKVLDYWLEMGVDGLRLDAVPYLYAEEGTNCENLPRTHKFLQRLRKHVDGKFPNRMLLAEANQWPEDAAEYFGEGDECHMNFHFPLMPRMYMALEMEDRFPIIDILDQTPGIPEECQWASFLRNHDELTLEMVTDEERDYMRRVYAHDPKARINLGIRRRLAPLMSNDRRKIELMNIMLLSLPGTPVLYYGDEIGMGDNFYLGDRDGVRTPMQWNGDRNAGFSRANPQQLQLPVIIDPEYHYEGANVEVQESNINSLLWWTRHMLSTSRRYKALSRGDIIFIQSQNPQVLIFTRTYKDETMLCIINLSRNAQAVTMDLSEYEGYIPEEVFSLSHFPGISARPYTVTLGPYGYFWFKLVRSEDEIGSRRYIDKPFAKVAAMDDLFSGKVLDRLESRVLPQYIRGCRWFGGKARKIVRVSVNDSIPVPACQNTVYLIVEVRYPSGSNDLYQLPVTFLPTGEFNPDEDFFMKQVICSVKIGENEGYLCDATYQKEFHRFLLDVIIAGKGLKGGIFKLTAEKGSTLEEYLPQEEDDSMNSVIFGLEQSNTSIMYDDKLCLKLYRKISSGISPEVEICRTLTEKTSFESSPGYLGALYLSRSRKDTSSLGILQNFIPNEGDAWSQTLHYVHRYYEEVLVLLPQLEEIPEIPPIGGETVEMPEIMHGLIGEIYLGMVNKLAERTAEMHLSLASPDLGPDFLPEAFTTLYQRSIYQSMREQVKRGMVMLKEQMKGIAKDYKGIAADLLGREQEILDRLSHIKARRIPASKIRIHGDYHLGQVLWTGKDFVIIDFEGEPARSISERRIKRAVFRDLAGMMRSFHYAAFNVLIQDRSIRPEDAEKLEPWAELWSFYTGQHFYDVYAAAVGGHGLIPENITEQHLLLRSYLMDKAIYELNYELNNRPEWVGIALKGLQRLLES

SEQ ID NO: 313 - DNA, 3339 bp, Geobacter metallireducens GS-15
  CDS (1)..(3339): transl_table=11
atggcacgcagagaaccgttgcggggcggcaatcccctctggtaccgggacgccattatctaccagctccacgtcaaggccttcgccgactcggacggcgacggcatgggggacttccggggcctcatggggaagctcgactatctccaatccctggggatcaccgccatctggatcctccccttctacccttcgccgctacgggatgacgggtacgacatcgccgactattacagcgtgaaccccagctacaacaccctgcgggaattccgggagttcctccgggcggcacacgcccgccgcatccgggtcatcactgagctggtcctcaaccacacctcggaccagcacccctggttccagcgggcccgccgggccaaaccgggatcggcccaccgcgactactacgtctggagtgacaaccccgaccgctaccaaggaacccggatcatcttccaggacttcgaaacctccaactggagctgggatccggtggccaaggcctactactggcaccggttctactcccaccagcccgatctcaactacgacaaccccaaggtccaggcggagatgctccgggtcatcgactactggctcgggatgggagtggacggggtgcgcctcgacgcggtcccctacctcttcgagcgcgaggggaccaactgcgagaacctccccgaaacccacgccttcctgaagaagctccgggcccacgtggacgcctcgttccccaaccggatgctcctcggcgaggccaaccagtggcccgaagacgccatcgcctacttcggcgagggggacgagtgcaacatgctcttccacttccccctcatgccccgtatgtacatggccatcgaaatggaggaccgcttccccgtaatcgacatcatcgaccagacccccgccatccccgaggggtgccagtgggccatcttcctccgcaaccacgacgagctgaccctggagatggtcaccgacgaagagcgggactacatgtaccggatctacgccgccgacccgaaagcgcggatcaacctggggatccggcggcgcctcgctccgctcatggagcgggaccggcggaagatcgagctgatgaacgcccttctcttctcgctccccggcacccccatcatctactacggcgacgagatcggcatgggggacaactactacctgggggaccgcaacggcgtccgcacccccatgcagtggagccctgaccgcaacgccggcttctccggcgccaacccccagcggctctacctgccggtcatcatcgaccccgaataccactacgaggcggtaaacgtggagattcaggagcgcaaccccacgtcgctcttatggtggatgcgccgcaccatcgccgtgcgccgccgccaccgggccttcagcagcggcaccctggagatgctctatccggccaatcaccgggtcctcgcctttctccggcgccacgaagacgaggtgatcctcgtagtgggaaacctctcccgcttcgcccaggccgtgagcctcgacctgaaggagttcgccggcatatcgccagcagacctcttcagccggaaccggtttccggtcatccgcgaaatcccctaccccctcaccctgggcccccacgatcatttctggttcatcctgagccgtgcagagtcgccacgcctgccagagggagaactgccgcggatcaacctcccgggaggactcccgtggtgggaggccctccagcataccggaggggacacccgcctggaacgggcgaccaccgactacctgaaccgaagcggctggttccgggggaaagcccgggcaatcatcggctatgccctgcgcgacaccgtgcttctgcggacatcagaccaggtctttcccctgttcttcctggaggtccgctaccagaacggcgcgccggaaacctacctgatccccgttgcgtttctccggggccccggggcgaaacgggtcgatgccgaatcgccacaggcggccattgcatccctctccgtgggggacgaagcagggatcctctgcgatgcgctccatgaccgggagttcagggacgcgctcctcgcccttgcccttggccggcgccgactccatggtaaacgggagagcctcgtcgtaccgctccatgggagaggaggccacgccgaaggaatgcgggaaacggagcatctcatttccgagctcgtcacgggggaagaggcgagcagtgtcatcctctatggcgatcggcacgtgttcaagctgtaccgcacggtggaaccgggggtgaattcggaggtggagctggtccggtttctgacggaaaagtcccgctaccccaacattgtccccttccaggcgagtctcgagttgcgccatcccggcaccgaaccatgcaccattggccttgtgcaggaatatgtgaaaaaccagggtaacggctggcggctcgcgctccacctcctcggccagtacttcgagcggattctctcccgccggggcgagatccctcctccgccgaagcggttctcgagcctcatagacggcagcgcctgcaccgttccggaaccggtcgcgaatctcattggcggcttctatctggaaatggcgggacttctcgggcgtagaaccgccgaactccacctggcccttgccgcggggggaaacgatccggcctggaaaccggaggcgtattcaaccatttaccagcgctccgtgtaccagtccatgcgcaaccaggcacggcgcacccttcagctcctgtcccagaaccgcaatcttctgccgatcgacgaccagggaccggctgaccgggtcctgggggccgaaaaggagattctctcctggctggcccaaatcgtcggccggcggatagggacgatgaagatccgcatccacggcaattttcacctggggaaagtgctcttcaccggcaaggatttcgtaatcctcgacttcgagggggagccggaccggaccctcagcgagcgccgcatcaagcgctctcccctgagggacgtggcatcaatgatccgctccttccacgctgccacgctgactgccctcgcacggcatgggaacggccgttccggagacgtccagcttctggagccgtgggcggatgcctgctattaccacgtgagctgccgctacctcgcggggtacctcgaacggatggggaacagtcccctcgttccggcagaccggaacgacctggcgaccctcctccgctcgttcctgctcgacagggcgctccgcgacctcgggttcgccctgggcaaccgccccgaaacggcctcgtcccccctgaaggggatcgagacggtgctgcgggaatacggggaatag

SEQ ID NO: 314 - protein, 1112 aa, Geobacter metallireducens GS-15
MARREPLRGGNPLWYRDAIIYQLHVKAFADSDGDGMGDFRGLMGKLDYLQSLGITAIWILPFYPSPLRDDGYDIADYYSVNPSYNTLREFREFLRAAHARRIRVITELVLNHTSDQHPWFQRARRAKPGSAHRDYYVWSDNPDRYQGTRIIFQDFETSNWSWDPVAKAYYWHRFYSHQPDLNYDNPKVQAEMLRVIDYWLGMGVDGVRLDAVPYLFEREGTNCENLPETHAFLKKLRAHVDASFPNRMLLGEANQWPEDAIAYFGEGDECNMLFHFPLMPRMYMAIEMEDRFPVIDIIDQTPAIPEGCQWAIFLRNHDELTLEMVTDEERDYMYRIYAADPKARINLGIRRRLAPLMERDRRKIELMNALLFSLPGTPIIYYGDEIGMGDNYYLGDRNGVRTPMQWSPDRNAGFSGANPQRLYLPVIIDPEYHYEAVNVEIQERNPTSLLWWMRRTIAVRRRHRAFSSGTLEMLYPANHRVLAFLRRHEDEVILVVGNLSRFAQAVSLDLKEFAGISPADLFSRNRFPVIREIPYPLTLGPHDHFWFILSRAESPRLPEGELPRINLPGGLPWWEALQHTGGDTRLERATTDYLNRSGWFRGKARAIIGYALRDTVLLRTSDQVFPLFFLEVRYQNGAPETYLIPVAFLRGPGAKRVDAESPQAAIASLSVGDEAGILCDALHDREFRDALLALALGRRRLHGKRESLVVPLHGRGGHAEGMRETEHLISELVTGEEASSVILYGDRHVFKLYRTVEPGVNSEVELVRFLTEKSRYPNIVPFQASLELRHPGTEPCTIGLVQEYVKNQGNGWRLALHLLGQYFERILSRRGEIPPPPKRFSSLIDGSACTVPEPVANLIGGFYLEMAGLLGRRTAELHLALAAGGNDPAWKPEAYSTIYQRSVYQSMRNQARRTLQLLSQNRNLLPIDDQGPADRVLGAEKEILSWLAQIVGRRIGTMKIRIHGNFHLGKVLFTGKDFVILDFEGEPDRTLSERRIKRSPLRDVASMIRSFHAATLTALARHGNGRSGDVQLLEPWADACYYHVSCRYLAGYLERMGNSPLVPADRNDLATLLRSFLLDRALRDLGFALGNRPETASSPLKGIETVLREYGE

SEQ ID NO: 315 - DNA, 1785 bp, Exiguobacterium sp. 255-15
  CDS (1)..(1785): transl_table=11
atgaataaagcagctgtgtttcaccgggccctgtctccgtatgtctatacatacgatcaagaagcggttcatatccgcttgatgtcagccaaaggggacctggaccgtattgaactgatccacggggatccttatgaatgggatgcagaaaaagaggaagatcgggactggaactttgatccggataaagaaaaattttggaaaacggagacgacagacatgacgtttgccggatcggatgcgacacatgatttttggttcgttgccatccggcccccaaagaagcgggtccgctacggctttaacgttcatgctaacggtgaatcggccgtctatacggaacgcggctggtacgatgaagtaccgctcgatcatccgggctactactttgccgtcccatatatgaatgcggtcgatgtatttgatgcgccgtcatgggtcaaagacaccgtctggtatcaaatttttcccgatcggttcgcgaacggggatttgacgaatgatcgtccgggtaccatcgcctggggtgccgaagcaccggcgtttgacaatcatttcgggggcgattttcaaggagtgattgatcatatcgattacttaaaagagctggggattaccggaatttatttttgtccggtctttgtcgcaccgtcgaatcataaatacgatacgttagattatttacgactcgatccggcctttggaacagaagagacgttccgggaaatgattcatttgctccatcaaaatgggattcggattttactggacgccgtctttaatcacgtcagcgttgatcatccggccttccaagacgtcattgcgcatggcaatgagtcgcagtatgcgaattggtttatgatggactcgttcccggtccaatcgacaccagtgccgaactatgaagtttttgcctttgaagggaatatgccgaaacttaatacggcgcatcctgatgtaaaagagtacttgttaaaagttgggcgttactgggtggaagagttccacgtcgacggatggcgactggatgtcgcgagtgaagtggatcatgctttttggcgtgagttccggcgtgaagtccgggcagcgaatccggaagcctatattgtcggcgagtgttggacagattcacaaccgtggttgctcggcgatcagtttgatgcggtcatgaactacggattgacggaagctttcttaacattttttgcgacgaatgaaagtacggcgtctgaattcagtcatgcaatcgtcaggaatctgaacagcaatacgatgaatgtcaacgaagtgatgttcaatctggtggattcgcatgatacaccccgtgccttgacgcgggcgaatggggaccgtgatcggatgaaactgttgatgctgtcactgctgacattcacgggaagtccggtcatctattacggagatgaaatcggtatgacaggcggtcaggatccggataaccggaagtgtatggtctgggatcaggcggaacaggacagggatctcttggcgtatatcacaaagttggttgatttacggaaatcgcaccccgctctcgccaacgcgagcggctatcaattcgaacaaatggatgatgagacggcaagtttcctcgttcgtcgtcagtctgatgaagcgacctatttgattggatttaacaatggttcagaagaaatccgctttgacttggacaaagcagcggttgatttaatggacggacaacggtatttgggaaccgtcaccgtacgtccgttgtccggaaaaattctccgggtggaaacaacataa

SEQ ID NO: 316 - protein, 594 aa, Exiguobacterium sp. 255-15
MNKAAVFHRALSPYVYTYDQEAVHIRLMSAKGDLDRIELIHGDPYEWDAEKEEDRDWNFDPDKEKFWKTETTDMTFAGSDATHDFWFVAIRPPKKRVRYGFNVHANGESAVYTERGWYDEVPLDHPGYYFAVPYMNAVDVFDAPSWVKDTVWYQIFPDRFANGDLTNDRPGTIAWGAEAPAFDNHFGGDFQGVIDHIDYLKELGITGIYFCPVFVAPSNHKYDTLDYLRLDPAFGTEETFREMIHLLHQNGIRILLDAVFNHVSVDHPAFQDVIAHGNESQYANWFMMDSFPVQSTPVPNYEVFAFEGNMPKLNTAHPDVKEYLLKVGRYWVEEFHVDGWRLDVASEVDHAFWREFRREVRAANPEAYIVGECWTDSQPWLLGDQFDAVMNYGLTEAFLTFFATNESTASEFSHAIVRNLNSNTMNVNEVMFNLVDSHDTPRALTRANGDRDRMKLLMLSLLTFTGSPVIYYGDEIGMTGGQDPDNRKCMVWDQAEQDRDLLAYITKLVDLRKSHPALANASGYQFEQMDDETASFLVRRQSDEATYLIGFNNGSEEIRFDLDKAAVDLMDGQRYLGTVTVRPLSGKILRVETT

SEQ ID NO: 317 - DNA, 1674 bp, Exiguobacterium sp. 255-15
  CDS (1)..(1674): transl_table=11
atggaacgtaaatggtggcacgacagtgtagtctatcaaatttatccgcggagtttcaatgattcaaacggagacggaatcggggatctcgtcggtatcattgaaaaactggattacttaaaagaacttggaattgatgttatttggctgagtccggtctatgactcaccaaatgatgataacggatatgatattcgggattatgaagccatcatgagcgaattcggaacgatggcggactttgatcgtctgctcgatcaggcgcatgagcggggaatcaaaatcgtaatggatttggtcatcaaccattcgtcggacgagcacgcctggtttgcagagtcacgaaagagtaaggacaatccataccgggactattacatttggagaagcgccaatgaagacgggacgctcccgaacaactggggctcgattttttccggaccggcttgggaactggatgaggcgacaaacgaatattacttgcacctgttttctaaaaagcaacctgatctgaactgggaaaacgaaaaactgcgtcaagaagtctatcagatgattacgcgctggttggatcgcgggattgacggtttccggatggacgtcatcaacttaatctcgaagacacccggtcttccggatgcgacggttcctcccggtgctctatacggggacggcggacaacattatattaacggaccaagaatccatgagtttttaaaagaaatgaatgatgcttcttttggtaattatgatgtcttgacggttggtgaaatgccgggggcgacaactgacgacgccattctttatacagatccagaacgcaaagaagtcaacatggtgtttacgttcgaacatatggacttggattccggtccgggtgggaaatgggatgtaaaaccatttgaccttcagaaactgaaagaaaacttcacgaaatggcaagtcgccttacacgaaaaagggtggaactcgctgtactggaataatcacgaccagccacgcgttgtcagccgattcggaaatgatacgacgtatcgcgtcgaatccgctaaaatgttagcgactctgctccacttgttaaaaggaactccctacatttatcaaggggaagaaatcggcatgacgaacgtggcctttgaatcgattgaggactatgaggatatcgaaatccgtaatatgtggaaagaacggaccgagcaaggggcttcaccggcagagttattgcgtgctgtccatgtgaagggacgggacaatgcccggacaccaattcaatgggatgcgacggagcatgccggatttacgacgggtacaccctggttaaaagttaatccgaactatccgaccatcaatgtcgaacaggccttggaggatccggattccatcttctattactataaacagctgattgcgttacgtcatcagcacgatgtaatcgtatacggtgaatatgccttgattttagaagaggaaacggacatctatgcgtacacaagaacatatgaaaatgaaacatggtacatttactgctccttcagtcaggaagaagtaacggttccgctgtctcacgatacttctgatccggtcatcggaaattacagtgaatcaccggcaggatcaaaagaagaattggttcttcgaccgtatgaagcaatcgtctaccggacgacgcggtaa

SEQ ID NO: 318 - protein, 557 aa, Exiguobacterium sp. 255-15
MERKWWHDSVVYQIYPRSFNDSNGDGIGDLVGIIEKLDYLKELGIDVIWLSPVYDSPNDDNGYDIRDYEAIMSEFGTMADFDRLLDQAHERGIKIVMDLVINHSSDEHAWFAESRKSKDNPYRDYYIWRSANEDGTLPNNWGSIFSGPAWELDEATNEYYLHLFSKKQPDLNWENEKLRQEVYQMITRWLDRGIDGFRMDVINLISKTPGLPDATVPPGALYGDGGQHYINGPRIHEFLKEMNDASFGNYDVLTVGEMPGATTDDAILYTDPERKEVNMVFTFEHMDLDSGPGGKWDVKPFDLQKLKENFTKWQVALHEKGWNSLYWNNHDQPRVVSRFGNDTTYRVESAKMLATLLHLLKGTPYIYQGEEIGMTNVAFESIEDYEDIEIRNMWKERTEQGASPAELLRAVHVKGRDNARTPIQWDATEHAGFTTGTPWLKVNPNYPTINVEQALEDPDSIFYYYKQLIALRHQHDVIVYGEYALILEEETDIYAYTRTYENETWYIYCSFSQEEVTVPLSHDTSDPVIGNYSESPAGSKEELVLRPYEAIVYRTTR

SEQ ID NO: 319 - DNA, 1611 bp, Exiguobacterium sp. 255-15
  CDS (1)..(1611): transl_table=11
atgaatcgggcctggtggaaagaagccgttgtctatcaagtgtattggcgcagttttaaagattcgaacggagacgggatgggcgatttacgcggagtaattgaaaaactcgattacatcgcttccctggatgtcgatatcatctggttaaatccctgttatacatcaccggatgtcgataacggatacgacatttcggattattactcgattatgccgaaggcgggaacgatgtcggatctggaagaactgattgcgtccgcccatgaacgaggactgaaactgattcttgatttggtcgtcaatcatacgagtgatcaacatacgtggtttaaagaatcccgcagcagtcggacgaacgagaaagccgattggtacatttggcgggacggggtcaaaggaacgccgccgaacaattggcggtcgtatttcgcgccgagtccctggacgtgggatgagacacgcgagcagtattatttccattcctttgcatcggagcaaccggacttgaactgggagcatcctgctgtccggcaggccgtatatacgatgatgcggtggtgggccgataaaggaatcgacggcttccggatggatgtcatcaatctgatcaagaaacgggcgacgtatgatgatgtcgcagatcctttggaattatcctacttagggaatcaaccgggcattcacgagttcttacaggagatgcaccaagaagtactggcgggaaccgatctctttaccgtcggtgagattccgtttgtcggcccggaagacgggttgctgtatgtcggggaggaacggaatgagctgcgaacgctgtttcacttcgaagtcgcggacgacatggagacgatggatttaccgcgctttaaacaaatccagaagcgttggtatgaggcgctttatccgagcggtgtcgcgtcccaattcttgaataaccatgaccacacccgtcaggtgacccggttcggaagcgaacggtatcgcgtcgaaagtgccaagttactgggtttgatgctccacacgttaccgggcattccgtacatttatcagggcgaagaaatcggtatgaccggcattcgtttttctgatccggagtcctatcaggacgttgcgtttcgaaatcagtacgccgaacggattgcggccggtgaatcacccggaacggtcctgtcatcgatgcagttgcgggcgcgtgacaactcacgaacaccgatgcagtggaatacggaccaatcagccggatttactatagggacaccatggatggcggtcaatccgaactaccgtgacattaacgtcgaagcagcggaacaggatccgcattccgtgctggctttttaccggcaactgattgatttacggaagactcatccggtcatggtttacggggtttatcgtgatttggcgattcaagatccgtacctgtatgtctatgaaagggtcctagacggagtggtttggcggattgtcttaaacgtccatgatgaaccggtgacgacgacgttcggtttaccggaagaacagttgattttgacgaattatgagacggcggacatcaatcgattggcaccgtacgaagcccggttgtaccaatacgagatgccttaa

SEQ ID NO: 320 - protein, 536 aa, Exiguobacterium sp. 255-15
MNRAWWKEAVVYQVYWRSFKDSNGDGMGDLRGVIEKLDYIASLDVDIIWLNPCYTSPDVDNGYDISDYYSIMPKAGTMSDLEELIASAHERGLKLILDLVVNHTSDQHTWFKESRSSRTNEKADWYIWRDGVKGTPPNNWRSYFAPSPWTWDETREQYYFHSFASEQPDLNWEHPAVRQAVYTMMRWWADKGIDGFRMDVINLIKKRATYDDVADPLELSYLGNQPGIHEFLQEMHQEVLAGTDLFTVGEIPFVGPEDGLLYVGEERNELRTLFHFEVADDMETMDLPRFKQIQKRWYEALYPSGVASQFLNNHDHTRQVTRFGSERYRVESAKLLGLMLHTLPGIPYIYQGEEIGMTGIRFSDPESYQDVAFRNQYAERIAAGESPGTVLSSMQLRARDNSRTPMQWNTDQSAGFTIGTPWMAVNPNYRDINVEAAEQDPHSVLAFYRQLIDLRKTHPVMVYGVYRDLAIQDPYLYVYERVLDGVVWRIVLNVHDEPVTTTFGLPEEQLILTNYETADINRLAPYEARLYQYEMP

SEQ ID NO: 321 - DNA, 1788 bp, Exiguobacterium sp. 255-15
  CDS (1)..(1788): transl_table=11
atgctgaaagaagctgttttccaccgcgcgatgtcaccgttcgtctataagtatgatgacaaaaccattcatgttcgactgcagacgaaaaaaaatgacgtcgaccatgttgatcttatttggggagatccgtacgactggcataccgaaaacccggatgatgccgattggaactttgatccgtccaaatcaaactattggaatactttcgaaacccctatgaaacggagcgggtcagatgagttattcgattattggttcatcgatgtcgttcctcctttccgccgacttcgttacggattccggcttcacgacggacattcgagtcaagtctttaccgaacgtggctggtttgatgaaaagccgctagatgataccggatactacttctgtgttccttttttaaacaaagtggatgtgttccatgctccggactgggtgaaggatacagtgtggtatcaaatcttccccgaccgctttgccaacggagattcgacgaatgatccggccggtacccttccatggaatagtacggcacctacaacgacaaatctgttcggcggtgattttcaaggcgtcattgataaaatcgattacttagtggatctcggcatcacaggcatttacttctgtccaattttcgaagccaagtccaatcataaatacgacacgattgattatttggaaattgatccgcagttcggaactaaagaaaagtttaaggaaatggttgatttactgcatgcaaatggaattcgcatcatgctggatgccgtctttaatcatgccggtttccaccataaagcattcgccgacattcgggaacacggcagcaattcttcttaccgggattggttccacctccggaacttccctctcgtaaccgagccgatgccgaactatgacacgtttgcgtttgttccggaaatgccgaagttcaatacggaaaatccggaagtaaaagaatacttacttcatgtcgcccgttactgggtcgaagaattcgggatcgacggctggcggcttgatgttgccaacgaagtcgatcatgccttctggcgtgacttccgttctgtcgtcaaggaagcggatccggagacgtatattctcggtgaaatttggcacgattcacaggaatggttgctcggtgaccaatttgatgccgttatgaactatccgttcacgaatgctgcacttaatttctttgcactcgataagacatctgcttccacctatgccaatgacatgtcgcatgtcttattctcaaacacggtcaacgtcaacgaagtatcgtttaacttaatcggttcacacgatacgccgcgtgccttgacccgtgccggaaacgacaaaaacaagatgcgtctgctgctgttatccatgctgaccttctccggaagtccggttatctattacggagatgaaatcggactcgacggtgatcaggatccgggttgccggaaatgtatgccgtggaatccggaagagcaggatttgaatctgttgatgtacacgaaacatctgcttcagttacgaaagcagcacaggacacttgccaatcacggacagatttcattcgtccatgccgacgatgaaaccaataccatcgtcatgcgtcgtatgagtcaggatgggacgtattacgtctatttcaataactcgaatcatcaggcgacaatcccggctcctcagtccggccaaggaatggatctcttttcgaacacaccacttccttcattagaagtgacgctcgctccgtatacaggaactatcattcaagtgatttga

SEQ ID NO: 322 - protein, 595 aa, Exiguobacterium sp. 255-15
MLKEAVFHRAMSPFVYKYDDKTIHVRLQTKKNDVDHVDLIWGDPYDWHTENPDDADWNFDPSKSNYWNTFETPMKRSGSDELFDYWFIDVVPPFRRLRYGFRLHDGHSSQVFTERGWFDEKPLDDTGYYFCVPFLNKVDVFHAPDWVKDTVWYQIFPDRFANGDSTNDPAGTLPWNSTAPTTTNLFGGDFQGVIDKIDYLVDLGITGIYFCPIFEAKSNHKYDTIDYLEIDPQFGTKEKFKEMVDLLHANGIRIMLDAVFNHAGFHHKAFADIREHGSNSSYRDWFHLRNFPLVTEPMPNYDTFAFVPEMPKFNTENPEVKEYLLHVARYWVEEFGIDGWRLDVANEVDHAFWRDFRSVVKEADPETYILGEIWHDSQEWLLGDQFDAVMNYPFTNAALNFFALDKTSASTYANDMSHVLFSNTVNVNEVSFNLIGSHDTPRALTRAGNDKNKMRLLLLSMLTFSGSPVIYYGDEIGLDGDQDPGCRKCMPWNPEEQDLNLLMYTKHLLQLRKQHRTLANHGQISFVHADDETNTIVMRRMSQDGTYYVYFNNSNHQATIPAPQSGQGMDLFSNTPLPSLEVTLAPYTGTIIQVI

SEQ ID NO: 323 - DNA, 1803 bp, Frankia sp. CcI3
  CDS (1)..(1803): transl_table=11
gtggggcaagcagaactacgtgcggctggacccggcggtcgagcccgcgcacgtcttcgctgtgcgggcccggtcgtgatggattctgagcctctcagcgaaccgatcggcgaccacacccccggcccggcccccgccatgccggtcggggggactttacgcgacccacactggttcaagcgagccgtgttctacgaggtgctcatccgcggcttcgcggactccaacggcgacggcacgggggacattcgcggcctgatctccaggctcgactacctggagtggctcggtgtcgactgtctgtggctgctaccgatctactcctcgccgttgcgtgacggcggctacgacatcagtgactactttcagatcctgccggaattcggtgacctcggcgacttcgttagcctggttgacgaggcccaccgccggggcatccggatcatcgcggatctggtgatgaaccacacctcggacgcccatccctggttccaggcgtcccgctccgaccccgacgggccgttcggggacttctacgtctggtccgacagcgacgagctgtacccggacgcccggatcatcttcgtggacaccgagaagtcgaactggtcgtgggatccggtccgcggtcagtactactggcaccgtttcttctcccaccagcccgacctgaactatgacaaccccgaggtccaggaggcgatgctggaggttctgcgcttctggctcgatctcggcatcgacgggttccggctcgacgcggtcccctacctctatgtccgggagaacaccaacggcgagaacctgccggagacccacgagtacctcaagcgggtccgcaaggaggtcgacgccaagtacgccgaccgggtgctgctcgccgaggcaaaccagtggccctccgacgtcgtcgagtacttcggcaacgacgacgagtgccacatggcgttccacttcccgttgatgccgcgcatcttcatggcggtccggcgggagtcccgctacccaatctcggaaattcttgctcagacaccccagatcccgccgaactgccagtggggcatcttcctgcgcaaccacgacgagctgacgctcgaaatggtgaccgacgaggaacgggactacatgtgggccgaatacgcgaaagatccgcgtatgaaagccaacatcggcattcgtcgccggctggcgccgctgctggacaacagccgtgaccagatggagctgttcaccgcgctcctgctctcgctgcccggctcgccagtgctgtactacggcgacgagatcgggatgggcgacaacatctacctgggcgaccgggacagcgtccggactccgatgcagtggtcaccggatcgtaacgccggtttctccaccgcggacccggcccgactgtaccttcccctgatcatggatccggtctacggttatcaggccctgaacgtcgaggccggacagcgcatgccgacctcgttcctggcctggaccaagcggatgatcgaggtacgcaagcgtcatccggtcttcgggctcggcgactacaccgagctcggcgcgtccaatccctcgatcttcgccttcgtccgcgagttcggcgacgaccgggtcctgtgcgtcgcgaatctgtcccgcttcgcccagccggtggagctcgatctgcgtcgtttcgagggaatggttccggtggagctgctcggccgggtgcacttcccgccgatcggcgagcttccctacctgctgacactgccaggtcacggacattactggttcgcggtgaccagaccgggggaattcaccccctag

SEQ ID NO: 324 - protein, 600 aa, Frankia sp. CcI3
MGQAELRAAGPGGRARARLRCAGPVVMDSEPLSEPIGDHTPGPAPAMPVGGTLRDPHWFKRAVFYEVLIRGFADSNGDGTGDIRGLISRLDYLEWLGVDCLWLLPIYSSPLRDGGYDISDYFQILPEFGDLGDFVSLVDEAHRRGIRIIADLVMNHTSDAHPWFQASRSDPDGPFGDFYVWSDSDELYPDARIIFVDTEKSNWSWDPVRGQYYWHRFFSHQPDLNYDNPEVQEAMLEVLRFWLDLGIDGFRLDAVPYLYVRENTNGENLPETHEYLKRVRKEVDAKYADRVLLAEANQWPSDVVEYFGNDDECHMAFHFPLMPRIFMAVRRESRYPISEILAQTPQIPPNCQWGIFLRNHDELTLEMVTDEERDYMWAEYAKDPRMKANIGIRRRLAPLLDNSRDQMELFTALLLSLPGSPVLYYGDEIGMGDNIYLGDRDSVRTPMQWSPDRNAGFSTADPARLYLPLIMDPVYGYQALNVEAGQRMPTSFLAWTKRMIEVRKRHPVFGLGDYTELGASNPSIFAFVREFGDDRVLCVANLSRFAQPVELDLRRFEGMVPVELLGRVHFPPIGELPYLLTLPGHGHYWFAVTRPGEFTP

SEQ ID NO: 325 - DNA, 3582 bp, Desulfitobacterium hafniense DCB-2
  CDS (1)..(3582): transl_table=11
gtggtattggcttatcataattctcacgatcccttcttccgcagcccctttggggctgttccatgcggcggcctgctgcgcttaagactgcttatgcagccggaggattcttctggtgcgggcagtccggttcaggaatgctttttgcgcttatgggtgcaggaccgggaggagcggctgcccatgctcagggtggaagagccgatcctgtgggagataaatagggaaggaactgttacaggggaagaggctattacaggggaaggggtccttacgggagaaggagtcgtttatgaggtggaatatcctcttccccatgaaccgggaatcatctggtattactttattttcagggcagggggagaaacctgtttctatggcaataatcaggaagaactgggaggcgtgggtgagcttcgatcctccgagcctcccggttatcaaatcaccgtttaccggcccatggccttgccaggctggtacacccagggcatcatgtatcagatctatgtggatcgcttctttaacggggatgaacagggaaaagtcctcaatccccgcccccgctccctgatccatggggactggtctgatacccccttctatattaaaaatgaaaagggcgaagtcctacgctgggattttttcggcggcaaccttgccggtgtgatcaaaaagcttccttatcttaaggaattaggagtgagtatcctttatttgaaccccatcttcgattcctccagcaaccataagtatgacacgggggattatctcactcttgatcccatgtatggggacgaggagatctttgcccaattgatcaaggaagcccaaagcttaggaatcgcgattattctggatggggtgttcagtcataccggtgatgacagtatttattttaaccgttatgggagatatcctggtctgggcgcctatcaatccccggattccccctattactcctggtatcaatgtcatggggaaggacaggaaaaagaatattcctgctggtggggagtgtccactctccctgaagtttgggagatggagccctcttatcgcgagtttatcattcactctcctcaaggagttctccaatcctggatgaaacggggtattaaaggctggcgtctggacgtggctgacgagcttcccgatgaatttatccaggagttccgccaaatgatgaaaacaatggaccctgagggagtcctgatcggtgaagtctgggaggaccccacccataaattcagctatggcaagctcaggcagtatttctggggggaagaactggatgccaccatgaattatcctttgcggaatatctttctccagtacttccttgggcagatcgatgccggtcaggcccataaacgcatcatgaatctctatgaaaactacccccgggaaaactttttcgggcagatgaacttgatcggcagccatgaccgggcccggattctcaccctcctcggtgaagcgccgccgccggagcagctctccgccgtggaacaggagcagtatcgcttgcctgcccctgcccgggatctggctgtccagcggttgaaactgctgactttgctgcagatgagctttcccggtgttccctgtctgtactacggtgatgaagcgggctgtgaaggatatcccgatccctataaccgggggacctacccttggggaagggaagatcaggagatcctccaatggtttaaacgggtgcttcgttatcgccgggaatatgaggtgctgcggcaaggcgagttctcttcctggttcgagggaaaagagatctatgtcttgcaaaggaagggtgaaaaagaggagattattgtcctggttaatcgcagtgctgaggagtccacggaaatgacattgaagctggagcagaacgtggggcaggtgatcgatatctttgcgggggaagtgctgcacagtctttcgcttatcctaccccccttatccgcaaaggcccttttctatcagaaatatgagcgtggtcactattttaaacaggagatcatgacccgtgcctgcggcatccttatgcatatctcctctttgccgtctccctggggcattggcgatctgggggaagaggcctatgcttttgtggatttcctggctgaaggagggcaaagcctctggcaggtgctgcctttgaaccctctagggctgggagattccccttaccaaagtgagtccgccttagccggtaattttttgctgatcagtcttgatttgcttattgaggccgggctgctgaccgaaggggaggcccgcagggaatgggccgactatggtcaagaggttaaaaagactgagggaagcgaaggaagcgaaggaagcgaaggaagcgaaggaagcgaaggcctcgggagcgagggctttgcctgggtggaacgctataaggagaagctgctgcgcaaggcttatgaacgtttcaaggagaaattgcccaggtaccctttggatttaagcagtccggagggaggcagccagcctggaactaaggggtacttggaccctcagggttatgaccggtttatagaagagaatcaggactggctgcaagactacgctctctataagtgtttaaagcttaagttccccggcaaggcgtggcaccaatgggaagaaagctatcgcttgcggaagcctgaggccctggaggctgtgactgaagattatgccgaggagataaactatattttctttgttcaatatactttcgctgatcagtggcaaaggctgaaggactatgctcaggaaaaaggggtaaaaataatcggcgatctgcccatttatgtggcctatgacagttgcgacacctgggctaaccgggagtgctttgctctggatgaaaataatgctcccgcaggaaccgctggggtgccccccgactatttcaaccctgaagggcagaactggggaaatcccttatacgattgggatgctctccgggccgccgattatgcctggtggaagctgcgtttccggcaagggctggagcgctttgatgccttaagactggatcatttccgtggctttgagggctattgggaagttccccctcaggccgggagcgccaaggaaggccgctggctgaaagggccggggaaagaatttttcgaaagcctggtccgtgaattggggcctctgcccgtcatcgctgaggatttagggtgcattacccctgaagtcaataccctgagagctattttaggatttccggggatgagggtgacgcagttttcacccttgcagcaagaagggaattatgttgattattccggaacccatgataacgataccctgttgggctggtatcgctcccaaggctatagcgataaggattccctggcgcaagtggaaaggactatcgaggagctttatcaggggaatggtatctgggtcattttcccccttcaggacattcttaaactggattcccgggcgaggatgaatactcccggcacaattaaagggaattggcagtggcgtgtagaaagaggaaccttaactcaggaggtttgtgcgcgattaaggggtttggcggaaaagtatgggcggttatcctga

SEQ ID NO: 326 - protein, 1193 aa, Desulfitobacterium hafniense DCB-2
MVLAYHNSHDPFFRSPFGAVPCGGLLRLRLLMQPEDSSGAGSPVQECFLRLWVQDREERLPMLRVEEPILWEINREGTVTGEEAITGEGVLTGEGVVYEVEYPLPHEPGIIWYYFIFRAGGETCFYGNNQEELGGVGELRSSEPPGYQITVYRPMALPGWYTQGIMYQIYVDRFFNGDEQGKVLNPRPRSLIHGDWSDTPFYIKNEKGEVLRWDFFGGNLAGVIKKLPYLKELGVSILYLNPIFDSSSNHKYDTGDYLTLDPMYGDEEIFAQLIKEAQSLGIAIILDGVFSHTGDDSIYFNRYGRYPGLGAYQSPDSPYYSWYQCHGEGQEKEYSCWWGVSTLPEVWEMEPSYREFIIHSPQGVLQSWMKRGIKGWRLDVADELPDEFIQEFRQMMKTMDPEGVLIGEVWEDPTHKFSYGKLRQYFWGEELDATMNYPLRNIFLQYFLGQIDAGQAHKRIMNLYENYPRENFFGQMNLIGSHDRARILTLLGEAPPPEQLSAVEQEQYRLPAPARDLAVQRLKLLTLLQMSFPGVPCLYYGDEAGCEGYPDPYNRGTYPWGREDQEILQWFKRVLRYRREYEVLRQGEFSSWFEGKEIYVLQRKGEKEEIIVLVNRSAEESTEMTLKLEQNVGQVIDIFAGEVLHSLSLILPPLSAKALFYQKYERGHYFKQEIMTRACGILMHISSLPSPWGIGDLGEEAYAFVDFLAEGGQSLWQVLPLNPLGLGDSPYQSESALAGNFLLISLDLLIEAGLLTEGEARREWADYGQEVKKTEGSEGSEGSEGSEGSEGLGSEGFAWVERYKEKLLRKAYERFKEKLPRYPLDLSSPEGGSQPGTKGYLDPQGYDRFIEENQDWLQDYALYKCLKLKFPGKAWHQWEESYRLRKPEALEAVTEDYAEEINYIFFVQYTFADQWQRLKDYAQEKGVKIIGDLPIYVAYDSCDTWANRECFALDENNAPAGTAGVPPDYFNPEGQNWGNPLYDWDALRAADYAWWKLRFRQGLERFDALRLDHFRGFEGYWEVPPQAGSAKEGRWLKGPGKEFFESLVRELGPLPVIAEDLGCITPEVNTLRAILGFPGMRVTQFSPLQQEGNYVDYSGTHDNDTLLGWYRSQGYSDKDSLAQVERTIEELYQGNGIWVIFPLQDILKLDSRARMNTPGTIKGNWQWRVERGTLTQEVCARLRGLAEKYGRLS

SEQ ID NO: 327 - DNA, 1719 bp, Frankia sp. EAN1pec
  CDS (1)..(1719): transl_table=11
gtgaacgagtcggaaccgttcgcggagcagccgctgcgcgagaccgcggccgagggcggcgacacggggacgtcccaggacccgctgtggttcaagcgggccgtgttctacgaggtcctcgtccgcggcttcgccgactccaacggcgacggcaccggtgacctggccgggctggtctcgaaactggactacctcgagtggctcggcgtggactgcctgtggctgctgcccatctactcctcgccgctgcgcgacggcgggtacgacatcagcgactacttccagatcctccccgagttcggggacctgggcgacttcatcaacctcgtcgacgaggcgcaccggcgcgggctacggatcatcgccgacctggtgatgaaccacacctccgacgagcacccgtggttccaggcgtcgcgctcggacccggacgggccgtacggcgacttctacgtctggtccgacaccgacgagaagtaccccgacgcccggatcatcttcgtcgacaccgagaagtcgaactggacctgggacccggtgcgcgggcagtactactggcaccggttcttctcccaccagcccgacctcaactacgacaacccggacgtccaggaggcgatgctggaggtcctgcgcttctggctcgacctcggcctcgacgggttccgcctggacgccgttccctacctgtacgtgcgcgagggcacgaacggggagaacctgccggagacgcacgagtacctgcgccgggtccgcaaggagatcgacgccaagtacgccgacagggtcatgctggccgaggcgaaccagtggccctcggacgtcgtccagtacttcggcaatgacgacgagtgccacatggccttccacttcccgctgatgccgcgcatcttcatggcggtgcggcgggagtcgcgctacccgatctcggagatcctggcgcagaccccggagatcccgccgaactgccagtggggcatcttcctgcgcaaccacgacgagctgaccctggagatggtcaccgacgaggagcgggactacatgtacgccgagtacgcgaaggacccgcgtatgaaggcgaacatcgggatccgccgacgcctcgccccgctgctggacaacagccgcgaccagatggagctgtttaccgccctgctgctctccctgcccggcagtcccgtgctctactacggcgacgagatcggtatgggcgacaacatctatctcggtgaccgcgacggcgtgcgcaccccgatgcagtggtccccggaccgcaacgccgggttctcgacaaccgacccggcccggctgtacctgccggtgatcatggacccggtgtacggctaccaggcgctgaacgtcgaggccgagcagcggatgccgacgtcgttcctgtcttggaccaggcggatgatcgaggtccgcaagcggcatcccgtcttcgggctcggcacctacgaggagctcggcgcgtcgaatccgtcggtcttcgcgtatgtccgggagttcggtgacgacagggtgctctgcgtcgcgaacctctcccggttcgcccagcccgtcgagcttgacctgcggagattcgccggcctggtgccggtggagctgctcggccgggtccatttcccaccggtcggcgagcttccgtacctgctgacactgcccggtcacggacactactggttcgctctgtccaatccgggggaattcactcagtag

SEQ ID NO: 328 - protein, 572 aa, Frankia sp. EAN1pec
MNESEPFAEQPLRETAAEGGDTGTSQDPLWFKRAVFYEVLVRGFADSNGDGTGDLAGLVSKLDYLEWLGVDCLWLLPIYSSPLRDGGYDISDYFQILPEFGDLGDFINLVDEAHRRGLRIIADLVMNHTSDEHPWFQASRSDPDGPYGDFYVWSDTDEKYPDARIIFVDTEKSNWTWDPVRGQYYWHRFFSHQPDLNYDNPDVQEAMLEVLRFWLDLGLDGFRLDAVPYLYVREGTNGENLPETHEYLRRVRKEIDAKYADRVMLAEANQWPSDVVQYFGNDDECHMAFHFPLMPRIFMAVRRESRYPISEILAQTPEIPPNCQWGIFLRNHDELTLEMVTDEERDYMYAEYAKDPRMKANIGIRRRLAPLLDNSRDQMELFTALLLSLPGSPVLYYGDEIGMGDNIYLGDRDGVRTPMQWSPDRNAGFSTTDPARLYLPVIMDPVYGYQALNVEAEQRMPTSFLSWTRRMIEVRKRHPVFGLGTYEELGASNPSVFAYVREFGDDRVLCVANLSRFAQPVELDLRRFAGLVPVELLGRVHFPPVGELPYLLTLPGHGHYWFALSNPGEFTQ

SEQ ID NO: 329 - DNA, 1761 bp, Moorella thermoacetica ATCC 39073
  CDS (1)..(1761): transl_table=11
ttgctccaccatcgcccgggaatccgtttctgccagcccctggcacccgaccggctcctcctgcgcttaaaaattggccgccgggaacagcaaagctgccaggtaatctatgaagaccggggccttaaaacggcccccatgcatgcctatgcccgaacaccccgttacctttattaccaggctgagatcagcctctcccgtccctggcgctgccgttattttttccggctgcgggaaggggatggggatgaccgctatatctttgccggtggtaccggccaacagggccgcccctttacctatcagtggaccccggcagatatctttaccgttcccgactggatctacgacgccgtttcctatcaaatatttcccgatcgcttttacaacggcaacccggccaacgacccgccgggaaccaggccctggagcgaagcccctaccagggaaaacttcttcggcggcgacctggagggtatccaggcgaagataccctatctaaagtttctgggggtcaatgtcctgtggctcaaccccatttttgccgcctcctccaaccatcgctataacacccgcgattacctggccgtggacccggccctgggagataccgataccctgcgccgcctggtggcatccctccatggcgccggcatacgcatcatcctggatggtgtcttcaaccatacggggaccgatttctttgcttttaaagacgtggtcgcccggggagccggttccccgtataaggactggtactacttctatgacttcccggtacggagtgaaccccgggccaattatgcctgctggtgggatatccccagcctgcccaagctcaacgtcagaaaccccgaggttcgtaattaccttcttcacgtggcgacctactggctgtgggatgccggtaccgacggctggcgccttgacgtgcccaatgagatcgagccgcccttctggcgggagttttaccagcaggttaaagggaccaatccggaagcctacattgtcggcgagatctggcgcgacgcccgtttctggctgaacggccgttactttgacggggtgatgaattacctcttccgggacctggtccttgcatacttcgcccggaggctttttcccatttccaccctggatatgctcctgggcctggtgcgcctgcgctaccctgaggcggccaatttcgccctgttaaacctcctgggcagccatgacacggcgcgaattatcaccgccttccaggaagggttggccggcgttcccggacactccggcagctacgccgaggccgtagcccacctgcgaccggccctcatcctgcagctcacctatcccggtgcgcccctgatctactacggcgacgaggtaggcctcaccggcggcccggaccccgactgccgccggaccatgccctgggaaccccgggactgggaccgggatctcctgaacttttaccggtgcctgataaggttgcggcaccagttgcggcctttgcgacggggatttttccagcccctttttaccgacgaccaggccgaggtctacgcctatgcccggcgcctggagggagagaaggtaattataattctcaatgccagcgacctcccccagacggttaccctggcggcagccgtcgcgggactggctgaggatagtacctggcgggacggcctgagcaaccgcctcctggaggtgaagggcggccagatcagcctgcccctggacgccaattccggggccgttctctaccaggagtaa

SEQ ID NO: 330 - protein, 586 aa, Moorella thermoacetica ATCC 39073
MLHHRPGIRFCQPLAPDRLLLRLKIGRREQQSCQVIYEDRGLKTAPMHAYARTPRYLYYQAEISLSRPWRCRYFFRLREGDGDDRYIFAGGTGQQGRPFTYQWTPADIFTVPDWIYDAVSYQIFPDRFYNGNPANDPPGTRPWSEAPTRENFFGGDLEGIQAKIPYLKFLGVNVLWLNPIFAASSNHRYNTRDYLAVDPALGDTDTLRRLVASLHGAGIRIILDGVFNHTGTDFFAFKDVVARGAGSPYKDWYYFYDFPVRSEPRANYACWWDIPSLPKLNVRNPEVRNYLLHVATYWLWDAGTDGWRLDVPNEIEPPFWREFYQQVKGTNPEAYIVGEIWRDARFWLNGRYFDGVMNYLFRDLVLAYFARRLFPISTLDMLLGLVRLRYPEAANFALLNLLGSHDTARIITAFQEGLAGVPGHSGSYAEAVAHLRPALILQLTYPGAPLIYYGDEVGLTGGPDPDCRRTMPWEPRDWDRDLLNFYRCLIRLRHQLRPLRRGFFQPLFTDDQAEVYAYARRLEGEKVIIILNASDLPQTVTLAAAVAGLAEDSTWRDGLSNRLLEVKGGQISLPLDANSGAVLYQE

SEQ ID NO: 331 - DNA, 1623 bp, Shewanella baltica OS155
  CDS (1)..(1623): transl_table=11
atgagtgagttaacttggtggcgtggtgcggtaatttaccaaatttatccgcgtagccttttagatacgaatggtgatggcgttggtgatttgcgtggcattatcactaagctggactacattgcgagcctcaatgtcgatgccatctggatttcacctttctttaaatcgcctatggcagattttggctacgacatcagtgattaccgcgaagttgaccctctttttggcactatgcatgatttcgatgaattgattgaaaaagcccacggcttaggcattaaggtcattatcgatcaagtattaagtcatacctctgatcagcatgcgtggtttgttgaaagccgcgagagccgtacgaatcccaaagcggattggtacgtgtgggccgatcctaaggaagacggcactgcgcctaacaactggctcgcgatttttggcggttgtgcttgggaatgggaaccgcgcagacaacaatactatttacataacttcctgcgtagccagcccgatatcaacttccataatcctgacgtgcgccaagctgtgctggataatgtcgagttctggcttaaaaaaggcgttgatggctttcgcttagatgcgattaccttctgttatcacgatgaacagctcagggacaatccggcaaaacctaaggataaacgtcagggccgaggtttcagcgaagataacccctacgcctatcaatatcattactacaataatgaccgtccgcaaactatcgcgtttatcgaagacttacgccaactcattaatcgttatcctggtgcggtgaccttaggtgaagtgtctgcagaagactctttagctgtgatggcggcttacactaagggtgaagatcgcctgcacatggcctacagttttgagctattaaccgacgattacagtgctgcttatattcgccaaaccgtagaagcattagaagcgagcataggtgatgggtggccttgttgggctatcggtaatcatgatgtgcagcgcgtggcgagtcgttgggggcagggcaaacagaattcagacatggtcaaaatactcaatgccatgctaagttcactgcgcggtagtgtgtgtagttatcaaggtgaagaacttggtttaaccgaagcgccgattgaataccatgagttgcaagatccctttggcaaaaccttctggcctatgtttaaaggccgtgatggttgccgtacgccaatgccatggcaacaaggcgccgattttagcggttttagtgaggtttcaccctggttgccgatcgcccctgcgcatcaagcgttagcggtggatgtacaagaatcagatgcagattccatgcttaacggttatcgacgttttcttgcttggcgtaaattacatccagtgttggttgaaggcgatatccaatttgtggataccaacgagcccatcttggccttcatccgcaccttaggagagctcaaaatattcgtcggattcaacttaggcgataccaatgttgagttggatttatcacagttggaattgggtgaaatattaacgggacacggcctgaaaatcgcacaaatagaaaacaatcagctgaagttttcggcatttgccagcttttatgcagttttaaactga

SEQ ID NO: 332 - protein, 540 aa, Shewanella baltica OS155
MSELTWWRGAVIYQIYPRSLLDTNGDGVGDLRGIITKLDYIASLNVDAIWISPFFKSPMADFGYDISDYREVDPLFGTMHDFDELIEKAHGLGIKVIIDQVLSHTSDQHAWFVESRESRTNPKADWYVWADPKEDGTAPNNWLAIFGGCAWEWEPRRQQYYLHNFLRSQPDINFHNPDVRQAVLDNVEFWLKKGVDGFRLDAITFCYHDEQLRDNPAKPKDKRQGRGFSEDNPYAYQYHYYNNDRPQTIAFIEDLRQLINRYPGAVTLGEVSAEDSLAVMAAYTKGEDRLHMAYSFELLTDDYSAAYIRQTVEALEASIGDGWPCWAIGNHDVQRVASRWGQGKQNSDMVKILNAMLSSLRGSVCSYQGEELGLTEAPIEYHELQDPFGKTFWPMFKGRDGCRTPMPWQQGADFSGFSEVSPWLPIAPAHQALAVDVQESDADSMLNGYRRFLAWRKLHPVLVEGDIQFVDTNEPILAFIRTLGELKIFVGFNLGDTNVELDLSQLELGEILTGHGLKIAQIENNQLKFSAFASFYAVLN

SEQ ID NO: 333 - DNA, 1635 bp, Shewanella amazonensis SB2B
  CDS (1)..(1635): transl_table=11
atgagcattcatccctggtggcgcggcgctgccatctatcagatttacccgcgcagtcttaaggacagtaacggcgatggtattggcgatctgcaagggatcatcgagcgtctggactatattgccagcctcaatgtggatgcgatttggatctcgcccttcttccgctctcccatgaaggactttggttacgatatcagtgactatcttgatgtggaccccatgtttggcaccatggacgactttgatgagcttattgccaaggcccattctctggggttgaaggtggttatcgatcaggtactcagccacacttccgacgaacatgcctggtttgccgagagccgccagagccgcgacaatccaaaggccgactggtatgtgtgggccgatccccgagaagacggtacccctcccaacaattggctggcgatattcggtggctgcgcctgggaatgggagccaagacgccagcagtattacctgcacaattttttgaagagccagccggatcttaactttcactgtgaagccgttcgtcaggcggtgctcaataacgtagagttctggctcaaaaagggcgtggatggtttccggctcgatgccattactttttgtttccacgataaggcgcttcgtgacaacccggcgaaaccggccgataagcgccagggccgaggtttttctgaagacaacccctacgcctatcagtatcactggtacaacaacgaacgtcccgaaacccttggttttatcgaagatttaagagcgctgattgatcgctacccgggtgccgtgaccctcggtgaagtctcaagcgaagactcccttgccaccatggccgaatacacccggggcgataaccgcctgcacatggcctacagctttgagcttttaaccaaggactacagcgctgggtatatccgcagcacagttgaagcactcgaaggtgccatcggtgacggctggccgtgctgggccataggcaaccacgatgtggagcgggtcatcagtcgatgggggcagggtaagggcacacctcaaatggccaagatgctgtcggccatgctgggatgcctgcggggcagcctgtgcgtgtatcagggcgaagagttggggcttaccgaagccgacatcccctttgatgcgctgcaggacccctttggtatcgcattctggcctaactttaaaggccgcgatggctgtcgtacccccatgccctggcaagccgaaggcgaatacatgggattcggtgcgacagcctctggtgccatgccctggttaccgctgccagaagaacatcgtgcactgaacgttgccgcccagagtgcgaacccggactcggtgctcaatcagttcagccgctttatggcatggcgccgcactcagccggctttggtaactggtgaaattaaatttattgatagcaaagagcccgttctggcgtttgaacgtgtgagctctgataaaaaagtgctttgtgtgttcaatttatctgataagccgcaaacgatgactgttcctggcagtgagccatggaagctccttgaaggccatgggcttgaaggtggtagtctggacggcgctggcactgttcgccttgcaccccacggggctctgttactgggcaactaa

SEQ ID NO: 334 - protein, 544 aa, Shewanella amazonensis SB2B
MSIHPWWRGAAIYQIYPRSLKDSNGDGIGDLQGIIERLDYIASLNVDAIWISPFFRSPMKDFGYDISDYLDVDPMFGTMDDFDELIAKAHSLGLKVVIDQVLSHTSDEHAWFAESRQSRDNPKADWYVWADPREDGTPPNNWLAIFGGCAWEWEPRRQQYYLHNFLKSQPDLNFHCEAVRQAVLNNVEFWLKKGVDGFRLDAITFCFHDKALRDNPAKPADKRQGRGFSEDNPYAYQYHWYNNERPETLGFIEDLRALIDRYPGAVTLGEVSSEDSLATMAEYTRGDNRLHMAYSFELLTKDYSAGYIRSTVEALEGAIGDGWPCWAIGNHDVERVISRWGQGKGTPQMAKMLSAMLGCLRGSLCVYQGEELGLTEADIPFDALQDPFGIAFWPNFKGRDGCRTPMPWQAEGEYMGFGATASGAMPWLPLPEEHRALNVAAQSANPDSVLNQFSRFMAWRRTQPALVTGEIKFIDSKEPVLAFERVSSDKKVLCVFNLSDKPQTMTVPGSEPWKLLEGHGLEGGSLDGAGTVRLAPHGALLLGN

SEQ ID NO: 335 - DNA, 3297 bp, Pelodictyon phaeoclathratiforme BU-1
  CDS (1)..(3297): transl_table=11
atgtatcaacccgaaccgctctggtacaaagacgccattatttatgaggcgcatgtcaagacgttctatgacagcaacaatgatggtgttggagattttcagggactgcgccagaagcttggttacctgcaaagtctcggtgttactgccatctggctgcttcccttttatccatcgcctttacgagatgatggttacgatattgccgattatatgagtgtcaatcccgattacgggacgatggaagatttccgggagtttattgaagaggcacactctcttggtataaaggtgattaccgagctggtcgtgaaccacacttccgaccaacatgcctggttccagcgtgcccggaaggctccggcaggctctccagagagaaacttctatgtctggagtgacgattccagcaaatattctgaagcccggattattttccaggacttcgaggcttcaaactggacatgggatccggttgccgggcaatatttctggcatcgcttctaccatcaccagcccgacctgaactttgaaaaccccgaagtacacaaggctctgctcggtgtgcttgatttctggcttggcatgggcgttgatggtctccgccttgatgctgttccctatctctatgaagaggaggggagtaactgcgaaaatttaccgaggacttatgagtatctgagggcgttgcgctcctatgtggatgagcactatcccaaccggatgctgcttgccgaagccaaccagtggcctgaagattctgcagcctattttggtaccggtgacctctgtcacatgaacttccactttcccctgatgccgcgcatgtatatggcgcttgctaccgaagatcgttttcccattctcgatattctggaacagacaccggaaattccggagatctgccagtgggcttcgttccttcgcaatcatgatgagctgacgcttgaaatggttactgacgaggagcgcgactacatgcgcagggtctatgccaacgatcccaaggcccgtatcaatcttggtatccgccgccgtcttgcaccgctcatggccaatgatcgccgcaagattgaactgatgaacatcatgctgctctcactgcccggaactccggtactctactacggtgacgaaattggcatgggcgataacttttatcttggtgatcgagatggagtacgtacacccatgcagtggaactctgaccgtaatgcagggttttcgcgtgccaatccccagcggctgcagctcccggtcatcatcgatccggaatatcattatgaggcggtcaacgtagaggtgcaggagagcaatgtcaactccctgctctggtggatgcgccataccatatcaactgctcatcgctacaaatcgctcagccgtggtaccattgagttcctgcaggtgagcaaccccaaagtgctgatttttattcgtcagttcgaggatgaaaccatgcttagtgtgatcaacctctcaagaaatgcccaggcggtgatgattgatctatcccgctttgacggctatatccctgaagaggtgttcagcatgaaccgttttccgaaaatcaggaaaattccctacatggtggccctgggatcctatggatatttctggttgcagttggtcaaggataccgaaaatacggatggtcgtccatacctcgacaaaccttttgcgacaccctctcgctggcaaagcctctttaccggcaaaagccgcgaacggcttgaaacagagattctgccccagtacttcaaggtaagccgctggtttggcggcaaggtgcgtcatatcatgcgtatctccatcgtcgataccattcctgtggcgggaatggcaaaagccaagttgctggttacggaagtgcgctattcaagtggtgagaatgaacgctatcaactcccggtatgcttttctccgctttccctggtttctctccaggatgataatttctacaagcgcgttattgcaagggtcgttattggcgatgaagagggttatctgtgcgacgccacctttgatgggcgtttcctgaaccatctctatcagcttgttaccggcaaggagagttggcagggtaaagagggcactgtttccggaatgaagtccatgaagatggatgctgttgcggaagagggaatggagcatgagcccctcctgatgggtgtcgaacaatcgaatacctcaattcgcttcaataatgatctctgcctgaagctctatcgccgcattgaaatcggaatctctcccgaagtggagatgtgccgtgcgctgagtgagcatacttcgttcaaaaacctgccgggctatcttggttcactgaactatgagcagagtcgcaccaacggctattctctcggtattttgcagcattttgtgaaaaacgaaggggatgcctggcagctttcgcttagtcaggtgaaacgctattatgatgatatccttgcaaaaatcaactccggcatggtattgcctgcgttgccgaaactcagtggtgatcccgtgcagcttcccgaaatcatgcatgaactgattggtgaagcctatcttggcatgcttgaaaagcttgcagaacggactgctgaaatgcacctctcccttgcttcgctcgacagcgatccggcatttgcgccagaggcttttactacactctatcagcgttctatctaccaggcgatgtgcgaacaggtgaagcgggcggttcttcttatccgtgaaatcatgcatcagatggctccggagcagcagcagcttgcatctctttttgtgcagaggcagaaacagattttgcagcagtttgatcccatcaggatagagaaaatcgatacactcaaaatcaggattcacggcgattttcatcttggccaggtactctttaccggcaaggattttgtgattatcgattttgagggagagcctgcccggcccctctccgaacggaaaatcaaacgttcggttttccgtgatatttcaggcatgttgcgctccttcgactatgcggcctttaatgtgctgcagcaggacaacaccctcttccgtccggaagagcggcttgcccttgagccttgggctgaccgctggagtttctatgctggccagtactttctcgacagctattttgcaaagaccggaggcagtaatattgttccggcagatccgaagcagcgtgaacatctgatgcgggcctatttgatgaacaaggcggtctacgaactcaattatgagctcaacaatcgtcctgactgggcctccataccgcttcggggtattatgaagattctggagtcgtaa

SEQ ID NO: 336 - protein, 1098 aa, Pelodictyon phaeoclathratiforme BU-1
MYQPEPLWYKDAIIYEAHVKTFYDSNNDGVGDFQGLRQKLGYLQSLGVTAIWLLPFYPSPLRDDGYDIADYMSVNPDYGTMEDFREFIEEAHSLGIKVITELVVNHTSDQHAWFQRARKAPAGSPERNFYVWSDDSSKYSEARIIFQDFEASNWTWDPVAGQYFWHRFYHHQPDLNFENPEVHKALLGVLDFWLGMGVDGLRLDAVPYLYEEEGSNCENLPRTYEYLRALRSYVDEHYPNRMLLAEANQWPEDSAAYFGTGDLCHMNFHFPLMPRMYMALATEDRFPILDILEQTPEIPEICQWASFLRNHDELTLEMVTDEERDYMRRVYANDPKARINLGIRRRLAPLMANDRRKIELMNIMLLSLPGTPVLYYGDEIGMGDNFYLGDRDGVRTPMQWNSDRNAGFSRANPQRLQLPVIIDPEYHYEAVNVEVQESNVNSLLWWMRHTISTAHRYKSLSRGTIEFLQVSNPKVLIFIRQFEDETMLSVINLSRNAQAVMIDLSRFDGYIPEEVFSMNRFPKIRKIPYMVALGSYGYFWLQLVKDTENTDGRPYLDKPFATPSRWQSLFTGKSRERLETEILPQYFKVSRWFGGKVRHIMRISIVDTIPVAGMAKAKLLVTEVRYSSGENERYQLPVCFSPLSLVSLQDDNFYKRVIARVVIGDEEGYLCDATFDGRFLNHLYQLVTGKESWQGKEGTVSGMKSMKMDAVAEEGMEHEPLLMGVEQSNTSIRFNNDLCLKLYRRIEIGISPEVEMCRALSEHTSFKNLPGYLGSLNYEQSRTNGYSLGILQHFVKNEGDAWQLSLSQVKRYYDDILAKINSGMVLPALPKLSGDPVQLPEIMHELIGEAYLGMLEKLAERTAEMHLSLASLDSDPAFAPEAFTTLYQRSIYQAMCEQVKRAVLLIREIMHQMAPEQQQLASLFVQRQKQILQQFDPIRIEKIDTLKIRIHGDFHLGQVLFTGKDFVIIDFEGEPARPLSERKIKRSVFRDISGMLRSFDYAAFNVLQQDNTLFRPEERLALEPWADRWSFYAGQYFLDSYFAKTGGSNIVPADPKQREHLMRAYLMNKAVYELNYELNNRPDWASIPLRGIMKILES

SEQ ID NO: 337 - DNA, 3414 bp, Prosthecochloris aestuarii DSM 271
  CDS (1)..(3414): transl_table=11
atggcgaatggaattttgtttcgctcaatcccgcatcgactccggcacatatttttaacgttcttcttcattcataattatttttatcgggattttatgccgaaaacacgcacaaccggccagcctgagccgcaatggtacaaggatgccatcatttatgaagcgcatgtcaaaacattttttgacagcaacaatgacggtgtcggtgattttgaggggcttcgtcagaagctgccctatcttgaaagtcttggtattacggcgatctggctgttgccgttttatccttctccgctgagagatgatgggtatgatattgccgattatatggatatcaatcccgattacggtacgatcgacgactttagagcatttctcaatgaagcgcatgagcgcgggctgaaagttattaccgagctggttatcaaccatacctccgatcagcatgcatggtttcagagggcccgtcgtgcagaacagggctccgacgagcgcaatttctatgtgtggactgacgatccgaaaaagtattcggaaacacggattattttccaggacttcgagtcgtcaaactggacttgggacccgatcgccggacagtatttctggcatcgtttctaccaccatcagcccgatcttaattttgagaacccctcggttgaaaaggcgctctacaaggtgcttgactactggctggagatgggtgtggacgggttgcgccttgacgctgtaccgtatttgtacgaggaagagggctccaactgcgagaacctgccgcgtacgcatgagtttttgaagcgtcttcgcaagcatgtcgacgacaagttccctaaccggatgctgcttgccgaggcaaaccagtggcctgaagatgctgccgagtatttcggggatggcgacgagtgccatatgaattttcattttccgctcatgccgaggatgtatatggccctggaaatggaggaccgttttccgatcatcgatattctcgaccagacgcccgagattgccgaaacctgccagtgggcttcgttcctgcgtaaccacgatgagcttaccctcgaaatggtgaccgatgaggagcgcgactacatgaggcgggtctacgctcatgatccgaaggcaaggatcaatctcggtatccgccgcagacttgcgcccctgatgtcgaacgaccggcgcaagatcgaactgatgaacatcatgctgctttccttgccgggaacaccggtactctattacggtgacgagatcggcatgggggataacttctaccttggagaccgtgatggtgtgcggacccccatgcagtggaacggggaccgcaatgccggtttttcgcgggccaatccgcaacagctgcagctgcccgttattatcgaccccgagtatcactacgaggcaaccaatgtcgaggtgcaggacagcaacatcaactctcttctgtggtggactcgtcacatgctctcaacctcgcgccgttacaaggcgctgagccgtggagatatacgctttatcgcatgtcagaatccccagatcctgattttcagcaggacttttgaggatgaaacgatgctttgtatcatcaacctttcccgtaacgcccaggcggccacggtcgatctgtcggagtatgagggccatactcccgaggaggtgttcagtctcagccacttcccaggcattacgtcgaggccctatacggtaacgcttggcccgtacggttatttctggttcaagctcatcaggaccgaagaggagatcggctcacgccgctatgttgacaagccctttgctcaggttgcttctctgaaggaccttttcgccggtaaagccctcgaacgtcttgaaacgaaagttcttcctgaatatatcagggggtgcaggtggttcggtggcaaagcgcgcaagattgtcagagtgagtgtcgaagagcatattcctgtgacggcatgcgacaacacggtctacatgattgtcgaagtacgttatcccagcgggtcgaacgatacctatcagcttccggtgacgtttctcccggctggagagttcaatcctgatgatgactactttctcaagcaggtcgtctgcagcgtaaaaataggtgatgaggagggttatctctgcgattcggcttatcagaaatcgttccacagcttcctgctcgataccattgtcagcagtaaggggctgaaaggatcgaccggtaaactgacgggtgaaaagggttcccgtgttgaagagtttcttgaaacccaagacgatggagagatgaattccgtgcttttcggggccgagcagagcaatacgtcgatcatgtatggcgacaggctttgcctgaagatctatcgtaagatctcttcaggggtttctcctgaggtggagatctgccgtatgctgacagaaaagacatcgttcgaaagttcgcccgcgtatcttggtgcccttcattttacccggagccgtaaagaccagtgctccctcgggattctgcagaatttcattccgaacgagggtgatgcatggagccagacgctgcatttcgtgcatcgttattacgaagatgtgctcgtcatgctgccgcagatttcagaggtacccgtcctcccatctaccggaggagagtctgtcgaaatgccggaaattattcatggccttatcggagaaccttacctcgagatggtgtcgagactggctgaaaggactgccggaatgcaccttgcactggcctcaccggaccttggtcaggactttatcccggaacccttcaccacgctttaccagcgttcgatctatcagtccatgagggagcaggtgaagcgcggcatggtgcttctgcgcgagcagatgggaggtgtcgctgaagagtaccaggggttggctgccgggcttttgaagcgcgaaggggagatcctcgaacaactgtcgcatatcaaagcccgcaagatcgccgcgtccaagatccggatccatggcgattatcatctcggtcaggtactgtggaccggtaaggactttgtgattatcgattttgagggcgagcctgcccgatcgttgagcgaacggcgtatcaagcgttcagcgttccgtgatcttgcaggtatgatgcgttccttccattatgcggcattcaacgtgctgattcaggatcgttcgatcaggcaggaagatgttgaacgacttgagccgtgggctgaactgtggagcttctataccgggcagcacttcttcgatgtctacgaagatgccgtcaggggacaggggctcattcctgaagatgttaaggagcagcatctgcttcttcgcgcttatcttatggataaggcgatttatgagttgaactatgagctgaacaaccgtcctgaatgggtcgggattgcgctcaagggtctcagcaggctgctcgagttgtag

SEQ ID NO: 338 - protein, 1137 aa, Prosthecochloris aestuarii DSM 271
MANGILFRSIPHRLRHIFLTFFFIHNYFYRDFMPKTRTTGQPEPQWYKDAIIYEAHVKTFFDSNNDGVGDFEGLRQKLPYLESLGITAIWLLPFYPSPLRDDGYDIADYMDINPDYGTIDDFRAFLNEAHERGLKVITELVINHTSDQHAWFQRARRAEQGSDERNFYVWTDDPKKYSETRIIFQDFESSNWTWDPIAGQYFWHRFYHHQPDLNFENPSVEKALYKVLDYWLEMGVDGLRLDAVPYLYEEEGSNCENLPRTHEFLKRLRKHVDDKFPNRMLLAEANQWPEDAAEYFGDGDECHMNFHFPLMPRMYMALEMEDRFPIIDILDQTPEIAETCQWASFLRNHDELTLEMVTDEERDYMRRVYAHDPKARINLGIRRRLAPLMSNDRRKIELMNIMLLSLPGTPVLYYGDEIGMGDNFYLGDRDGVRTPMQWNGDRNAGFSRANPQQLQLPVIIDPEYHYEATNVEVQDSNINSLLWWTRHMLSTSRRYKALSRGDIRFIACQNPQILIFSRTFEDETMLCIINLSRNAQAATVDLSEYEGHTPEEVFSLSHFPGITSRPYTVTLGPYGYFWFKLIRTEEEIGSRRYVDKPFAQVASLKDLFAGKALERLETKVLPEYIRGCRWFGGKARKIVRVSVEEHIPVTACDNTVYMIVEVRYPSGSNDTYQLPVTFLPAGEFNPDDDYFLKQVVCSVKIGDEEGYLCDSAYQKSFHSFLLDTIVSSKGLKGSTGKLTGEKGSRVEEFLETQDDGEMNSVLFGAEQSNTSIMYGDRLCLKIYRKISSGVSPEVEICRMLTEKTSFESSPAYLGALHFTRSRKDQCSLGILQNFIPNEGDAWSQTLHFVHRYYEDVLVMLPQISEVPVLPSTGGESVEMPEIIHGLIGEPYLEMVSRLAERTAGMHLALASPDLGQDFIPEPFTTLYQRSIYQSMREQVKRGMVLLREQMGGVAEEYQGLAAGLLKREGEILEQLSHIKARKIAASKIRIHGDYHLGQVLWTGKDFVIIDFEGEPARSLSERRIKRSAFRDLAGMMRSFHYAAFNVLIQDRSIRQEDVERLEPWAELWSFYTGQHFFDVYEDAVRGQGLIPEDVKEQHLLLRAYLMDKAIYELNYELNNRPEWVGIALKGLSRLLEL

SEQ ID NO: 339 - DNA, 1593 bp, Rubrobacter xylanophilus DSM 9941
  CDS (1)..(1593): transl_table=11
gtgacggagagaagagggcacctgtggtggcagcgcggggtggtctaccacatctacccccgcagcttcgccgacgcgagcggcgacggggtgggcgacctcgagggcatcgcctcccgcctggactacctggagtggctcggggtcgacgccatctggctctcccccttctacccctcccccatggcggacttcggctacgacatctccgaccactgcgccgtggaccccctcttcggcacgctcgcggacttcgacgagctggtcgcggagacgcaccggaggggcatgcgcctcatcgtcgactacgtccccaaccacacctcggacgagcacccgtggtttttggagtcccgcgcctcgcgcgagagcccgaggcgcgactggtacatctgggccgacccgaagcccgacggctcgccgcccaacaactggcggagcgtcttcgggggttctgcgtgggagtgggacgagagaacggggcagtactactaccacgccttccaccgcaagcagccggacctcaactggcgcaaccccgcggtgagggaggcgatgcacggggtgatgcgcttctggctggagaggggcgtggacggcttccgggtggacgccctgcgccacctcgtaaaagacgagaagctccgggacaacccgcccaacccggcctacgaggagggtcggccctcctacgaggcccatctccccgtctacaccaccgaccgcccggaggtgcaccggatgatctccgggatgcgccgcgtcctcgacggctgcggcggggagcgggtgatgatcggcgagctctacctgccgttcgacaggctcgtgctctactacggggagggggggcgcggggtccacctgccgacgaacatgcacctcatcacgacgccctggagcgccccctccctcgccgccctcatctccgagtacgaggcggccctccccccgcacggctggcccaactgggtcctgagcaaccacgacaacccccgcgtcgccacccgggtcggcccggagagggcgcgggcggccgccgtgctgctcctcaccctgcgcgggacccccacggtctactacggcgacgagatcggcatggtcgacgggaagatcccgccggagcgtctccgcgacccggccggctcgcagaacccgcgcctcagccgcgacccggcccgcaccccgatgcagtgggacgcctccccgaacgccgggttctgcccgccggacgccgagccctggctcccgctctcccccgaccgccgccaccgcaacgtcgccgcgcagagggagagccggggctccctcctctgcctctaccgcaggctcctgcgcctccgccgctcggagcccgccctctccgtgggctcctacgagccgctcgaggccgggggctccctgctggcctacgcccgcagccacgccgggcgccgcctcctcgtcgccctgaacctgggcgaggcccccgagcccctgccgccggtcctccgggggcgcgtcctgctctccacctctcccgggcaggagggcggagacctccgcccccccgcccggctcggccccggcgaggccctcgtcgtggcgccctag

SEQ ID NO: 340 - protein, 530 aa, Rubrobacter xylanophilus DSM 9941
MTERRGHLWWQRGVVYHIYPRSFADASGDGVGDLEGIASRLDYLEWLGVDAIWLSPFYPSPMADFGYDISDHCAVDPLFGTLADFDELVAETHRRGMRLIVDYVPNHTSDEHPWFLESRASRESPRRDWYIWADPKPDGSPPNNWRSVFGGSAWEWDERTGQYYYHAFHRKQPDLNWRNPAVREAMHGVMRFWLERGVDGFRVDALRHLVKDEKLRDNPPNPAYEEGRPSYEAHLPVYTTDRPEVHRMISGMRRVLDGCGGERVMIGELYLPFDRLVLYYGEGGRGVHLPTNMHLITTPWSAPSLAALISEYEAALPPHGWPNWVLSNHDNPRVATRVGPERARAAAVLLLTLRGTPTVYYGDEIGMVDGKIPPERLRDPAGSQNPRLSRDPARTPMQWDASPNAGFCPPDAEPWLPLSPDRRHRNVAAQRESRGSLLCLYRRLLRLRRSEPALSVGSYEPLEAGGSLLAYARSHAGRRLLVALNLGEAPEPLPPVLRGRVLLSTSPGQEGGDLRPPARLGPGEALVVAP

SEQ ID NO: 341 - DNA, 5328 bp, Rubrobacter xylanophilus DSM 9941
  CDS (1)..(5328): transl_table=11
ttgcgagagcgacggaggcccggaggtgcccagacccagacccccgatcatcatagaggacgtctacccggagctggactgcggccgctaccccatcaagcgggaggtcggcgaccggctggaggtgtgggccgacatcttcaaggacgggcacgatgccgtctcggcggtcgtccggtaccgggagaggggggcgcgccgctggtccgaggtgcccatgcgccaccacgagaacgaccgctggaccgcgagcttcccgctcaccaggaacacgcgctaccagtacaccatcgaggcctggccggacgagttcgagacctggcgctccgaggtggggaagaagctcgaggccgggcagcgggtggaggtggagctgctggaggggcgcgagatcctcgagcgggcctactcgcgctcgaaggacgggcgcctccggcagacgctcgacgccttcgacgccgccgggtacgaggggcggctcgcgctgctgcgctccgaggaggtgcgcgggctgatgcgcgagcaccccgaccgctcgctcgcgaccgcctacggcaagaccctcgaggtggtggtggaccgggtgcgggcccgctacggggcctggtacgagatgttcccccgctcgcaggggagcgtcccgggcaggagcgccaccttccgggaggccgaggggcggctggacgagctctcgtggatgggcttcgacgtggtgtacctcacgcccatccaccccatcgggaagaccaaccgcaaggggcgcaacaacgccctcgtggccgggcccggcgacccgggcagcccctacgccatcgggagcgaggagggcgggcacaaggccgtccaccccgagctcgggacgctggaggacttccggcgcttcgttgcggccgcccgcgagcgcgggatggaggtcgcgctcgacctcgccctgcagtgctcgcccgaccacccctacctcagggagcaccccgggtggttcaggcggcggcccgacggcaccataaagtacgccgagaacccgcccaaaaagtacgaggacatcgtcaacgtggacttctactgcgaggagtgggaggctctctggcgggagtggctggaggtcatcctgttctgggtggggcagggcgtcaggatcttccgggtggacaacccgcacaccaagcccttccccttctgggagtgggtgataggggaggtgcagcgggagcaccccgacgtcatcttcctctccgaggccttcacccggcccaaggtgatgcgcgctctggccaagctcggcttcacccagtcctacacctacttcacctggcgcaacaccaagcaggagctcaccgagtacctcaccgagctcaccatggactggcccaaggagtacatgcgccccaacttcttcgccaacacccacgacatcctcccgcacatcctgcagttcggggggcggcccgccttcatgatgcggctggtgctcgcggccaccctctcccccagctacggcatctacagcgggtacgagctgtgcgagaacaccccgcgcggggagcggggcaccaccgtctactaccaggactccgaggtctacgagtacaaggtctgggactgggacaggcccgggaacataaagggctacatccggagggtgaacgagatccggcgcgagaaccccgcgctgcaggagctgaccaacctctccttcctccccgccccggacgacaacatcatcttctacggcaagaggagcggggagaacgccgtcttcgtggcggtcaacctggacccgcacaacccccacgacacccacgtgcagttcccgctgtgggagctcggcatcggggaggaggagccctacgtggtcgaggagctcatcacccgccgcgagatcccggcccgcggcagctggttctgggtgcggctcgacccccaccagaacccggccgagatcttccgcctcaggagggcgggatgacccagacggcccgcaggggggcggcgcgccgggaggaggcctaccgggaggacccgctctggtacaaggacgccatcatctaccagctgcacgtaaaggccttcttcgactcggacaacgacggcatcggggacttcaggggcctgacgcagcggctggagtacataaaagacctcggggtcaacgccatctggctcatgcccttctacccctccccgatgcgcgacgacggctacgacatctccgagtacaagaacgtccaccccgagtacggcacccgccgcgacttccgcaacttcgtgcgccgggcgcacgccctgggcctcaaggtcataaccgagctggtcataaaccacacctccgatgcgcacccctggttccagcgggccagaaaggcgcccaggaactccgtctggcgcaacttctacgtctggagcgacaccgacaagaagtacgccgacgcccggatcatcttcaccgacaccgagacctccaactggacctgggacccggtcgcccagcagtactactggcaccggttcttcagccaccagccggacctcaaccacgacaacccccgggtcttcgacgccatcatgcgggtgatgcgcttctggctggacgccggggtggacgggctgaggctggacgccatcccctacctcatagagcgcgaggggaccgactgcgagaacctcccggagacccacgagatcctcaggcggatgagggccgagctggacgcccgctaccagaacaggatcttcctggccgaggccaaccagtggccggaggacgtgctgccgtacttcgggaagggcgacgagtgccacatggccttccacttccccctgatgcccaggatctacatggccgtggcgcaggaggaccggcaccccatcgtggagatcatgcagcagaccccggagatccccgaggtctgccagtgggccatcttcctcagaaaccacgacgagctgacgctggagatggtcaccgaccgcgagcgggactacatgtaccagacctacgccgccgacccccgcgcccggataaacctgggcatccggcgccggctcgcccccctcatggagaacgaccgggcccgcatagagctgctcaacagcctgctcatgagcatgcccggcacccccatcatctactacggggacgagatcgggatgggggacaacgtcttcctcggggaccgcaacgcggtgcgcacgcccatgcagtggacctccgaccgcaacgcgggcttctcccgggccgacccccacagcctctacctgcccccgatcatggacccggtctacggctacgaggccctcaacgtggaggcccagagccgcagcccgggctcgctgctgaactggatgaagcggatcatcgcggtgcgcaaggcccacaaggccttcgggcgggggacgctggagttcttgcaccccggcaaccggaaggtgctggcctatttgcgggagtacggggacgagacgatcctctgcgtggccaacctctcccgctccgcccagccggtggagctggacctctcccggttcagcgggcgggtgccggtcgagatgatcggggggagcagcttcccgcccatcggctcgctgccgtacttcctcaccctccccgggcacagcttctactggttcaacctcaccaccgaggccgaggccccgagctggcaccaggagagcccccgcttcttcgagccgccggtggtggtgctgcccgccggccgccagacggcccgggacatccgccggctgccgctgcgcctgcagcaccgccaggtggcgcagctggagcaggaggcgctgccggccttcctgagcgtccggcggtggttcgcggcgaagggcagcgagatagagcgggtgagcctcctcgcccgggcggagttcggcccggaccgcctgctggcgctgctgcgggtgggggccgggggcgccgaacacacctacttcctgccgctcgccgccgcctgggaggacgaggacggcgagcgggtctcgggcctcatgccgcacgccctggccaagatccggcgccgctaccgggtcggcgtcctcttcgacgcgctcgcggacgagggcttctgccgggaggtggtcgccgcgatggccggggggcgggagctggagatgggggaggggcgggtgcgcttctacgccaccggcgccctcgaggagctgctggcgggggagccggtgggggagctcgcggtccggcgggcctcggtggagcagagcaacacctcggtgatcctgggcgagcggctggtgctgaaggcctaccgccggctgcagccgggcgtcaacccggagctggagatcgggcgctacctcaccgaggtgcggcgcttcccgaacaccccgccgctcgcgggggccgtggagtacgaggacccgcgctcggggacggtctccctggccctcctgcagggcttcgtccccagccagggcgacggctggtcctacgtgctgggctacctggaccgctacctggagcggcgcctgctctccgcctcctggagcccggaggaggagggcccggcggagccccccgggcaggagggtcaggaggccgacgagggctttttcatggagctgatgcggaccctcggggtgcgcaccggcgagctgcacgctgccctggccgcccccaccgacgacccctccttctcccccgagcccgccccgcccgcggaggtctcccgctgggtcgaggccgtgctggacgacctgcggctcaccctgagcctcctggagcgccgccggtccgggctgccagaggaggtgcgccccgaggtggaccgcctgctccggatggaggcccgggccttcgaccggctggaggcgatctccgcccgggggatacgggccgtgaagacccgccaccacggggactaccacctcgggcaggtgctcgtcgccgggaacgacttccagatcatagacttcgagggcgagcccgcccgcaccctggaggagcgccgccgcaagcactcccctctgcgcgacgtggccggcatgctccgctccttcgactacgccgcccagaccgccctgatgaacctgggggccgaccgggccgtcggggaggacccggagcccgtggtgcgccgctgggagcggagcgtgcgggaggccttcctcgggggctacgccgagggcgtgcggggcgccggggtcctcccgggggagggcgaggaggccgccgccctcgtcgagcttttcgccctggagaaggcgctctacgagatccgctacgagctggacaaccgcccggactggatcgggataccggtccggggcgtcctggaccttctgacgagggaggagagcccgtga

SEQ ID NO: 342 - protein, 1775 aa, Rubrobacter xylanophilus DSM 9941
MRERRRPGGAQTQTPDHHRGRLPGAGLRPLPHQAGGRRPAGGVGRHLQGRARCRLGGRPVPGEGGAPLVRGAHAPPRERPLDRELPAHQEHALPVHHRGLAGRVRDLALRGGEEARGRAAGGGGAAGGARDPRAGLLALEGRAPPADARRLRRRRVRGAARAAALRGGARADARAPRPLARDRLRQDPRGGGGPGAGPLRGLVRDVPPLAGERPGQERHLPGGRGAAGRALVDGLRRGVPHAHPPHREDQPQGAQQRPRGRARRPGQPLRHRERGGRAQGRPPRARDAGGLPALRCGRPRARDGGRARPRPAVLARPPLPQGAPRVVQAAARRHHKVRREPAQKVRGHRQRGLLLRGVGGSLAGVAGGHPVLGGAGRQDLPGGQPAHQALPLLGVGDRGGAAGAPRRHLPLRGLHPAQGDARSGQARLHPVLHLLHLAQHQAGAHRVPHRAHHGLAQGVHAPQLLRQHPRHPPAHPAVRGAARLHDAAGARGHPLPQLRHLQRVRAVREHPARGAGHHRLLPGLRGLRVQGLGLGQAREHKGLHPEGERDPAREPRAAGADQPLLPPRPGRQHHLLRQEERGERRLRGGQPGPAQPPRHPRAVPAVGARHRGGGALRGRGAHHPPRDPGPRQLVLGAARPPPEPGRDLPPQEGGMTQTARRGAARREEAYREDPLWYKDAIIYQLHVKAFFDSDNDGIGDFRGLTQRLEYIKDLGVNAIWLMPFYPSPMRDDGYDISEYKNVHPEYGTRRDFRNFVRRAHALGLKVITELVINHTSDAHPWFQRARKAPRNSVWRNFYVWSDTDKKYADARIIFTDTETSNWTWDPVAQQYYWHRFFSHQPDLNHDNPRVFDAIMRVMRFWLDAGVDGLRLDAIPYLIEREGTDCENLPETHEILRRMRAELDARYQNRIFLAEANQWPEDVLPYFGKGDECHMAFHFPLMPRIYMAVAQEDRHPIVEIMQQTPEIPEVCQWAIFLRNHDELTLEMVTDRERDYMYQTYAADPRARINLGIRRRLAPLMENDRARIELLNSLLMSMPGTPIIYYGDEIGMGDNVFLGDRNAVRTPMQWTSDRNAGFSRADPHSLYLPPIMDPVYGYEALNVEAQSRSPGSLLNWMKRIIAVRKAHKAFGRGTLEFLHPGNRKVLAYLREYGDETILCVANLSRSAQPVELDLSRFSGRVPVEMIGGSSFPPIGSLPYFLTLPGHSFYWFNLTTEAEAPSWHQESPRFFEPPVVVLPAGRQTARDIRRLPLRLQHRQVAQLEQEALPAFLSVRRWFAAKGSEIERVSLLARAEFGPDRLLALLRVGAGGAEHTYFLPLAAAWEDEDGERVSGLMPHALAKIRRRYRVGVLFDALADEGFCREVVAAMAGGRELEMGEGRVRFYATGALEELLAGEPVGELAVRRASVEQSNTSVILGERLVLKAYRRLQPGVNPELEIGRYLTEVRRFPNTPPLAGAVEYEDPRSGTVSLALLQGFVPSQGDGWSYVLGYLDRYLERRLLSASWSPEEEGPAEPPGQEGQEADEGFFMELMRTLGVRTGELHAALAAPTDDPSFSPEPAPPAEVSRWVEAVLDDLRLTLSLLERRRSGLPEEVRPEVDRLLRMEARAFDRLEAISARGIRAVKTRHHGDYHLGQVLVAGNDFQIIDFEGEPARTLEERRRKHSPLRDVAGMLRSFDYAAQTALMNLGADRAVGEDPEPVVRRWERSVREAFLGGYAEGVRGAGVLPGEGEEAAALVELFALEKALYEIRYELDNRPDWIGIPVRGVLDLLTREESP

SEQ ID NO: 343 - DNA, 1755 bp, Mesorhizobium sp. BNC1
  CDS (1)..(1755): transl_table=11
gtgcttttttttatcagctcagcgcagctctccagcaaccttcgccattcgccgatttgcgcagcggaacataagcgacttgcgtgtgttcaccgcgtcatggggaacccaggaccagcgcggaaggagctcatgaaaggcacaagccctgacgttgaggtgcactcatcgcaagagccatggtggcggcgcggcgtcatctaccaaatctatccgcgctcctttcaggacagcaatggcgacggcatcggcgacatccgcggcatcatagatcgcctggactacctcgtctggctcgggatagatgccgtctggatttcgccgatcttcttctcgccaatggccgatttcggctatgacatcgcggattatcgcaagatcgaccctcttttcggtacgctcacggatttcgaccagctcattgaagccgcgcatcggcgtggaattcggatattgctcgactatgtgccgaaccactcctcagaccgtcatcaatggtttctggaggcgcgcagctcccgcgataatcctcggcgcgatttctacatatggcgggatgcggcgccggacgggggaccgccaaacaactggcaaagcgaattcggcggcagcgcatgggaactggatgccgcaaccggccaatattactaccatgccttcctgaaagagcagcccgatctaaactggcgcaatccagaagtgcgccgtgaaatgtacgacgtgctccgcttctggctggaccggggcgtcgacggttttcgcgtcgatgtcatgtggcatctcatcaaggacgcggagtttcgcgacaatccgcagaaccccgactggaccgaagacatgccgccgcacaagtcggtgctttcgatctattcctgcgatcaggaggaggtgcacgacgtagtctccgaaatgcgcgccgtgctggacgaatacgggggcgaccggctgcttatcggagaaatatatctgccgattgcccggctcgtcgcctattatggccgggatcttcgcggtgcgcacctgccgttcaatttccgccttattgaggcgcaatgggacgctcgccacatcgagcggcagattgtcgaatacgaggccgctctgccggagggcggctggccgaactgggttttgagcaatcacgataagccgcgtatcgcctcccgtgtcggccgggaccaggcgcgtgttgccgccatgatgctacttacgttgcgcggcacgccaaccatctattatggcgacgagatcgggatgaacgacgctcccattccgcctgagcgcgtgcaggacccgttcgagctgcgcgttcccggacgcggtttcgggcgtgatccccaacgcacgcctatgcagtgggacaatacggtgaatgcaggcttcagcaccggctcgccttggcttcctcttgccccggacaaggacagcttcaatgtggaggcggaacgcagcgatccgcactcaatgctgtcgctctatcgcaggctgattgcattccggcgagaaaatgatgcgctgaaccttggccgttacgcctccgtcgaggcagacagctgcgtgctcgcttacctccgggagacggagaatgatcgctatttgattgcacttaatctcgggcccgagccggcggtgctggaaacacccgggcaatgccggattgtgatcagcacggaaggcaaggcggaaggcgagattgtcgaggaaaagctccacctgcaaggcaatgagggcgtgctggcggagatgatgagttag

SEQ ID NO: 344 - protein, 584 aa, Mesorhizobium sp. BNC1
MLFFISSAQLSSNLRHSPICAAEHKRLACVHRVMGNPGPARKELMKGTSPDVEVHSSQEPWWRRGVIYQIYPRSFQDSNGDGIGDIRGIIDRLDYLVWLGIDAVWISPIFFSPMADFGYDIADYRKIDPLFGTLTDFDQLIEAAHRRGIRILLDYVPNHSSDRHQWFLEARSSRDNPRRDFYIWRDAAPDGGPPNNWQSEFGGSAWELDAATGQYYYHAFLKEQPDLNWRNPEVRREMYDVLRFWLDRGVDGFRVDVMWHLIKDAEFRDNPQNPDWTEDMPPHKSVLSIYSCDQEEVHDVVSEMRAVLDEYGGDRLLIGEIYLPIARLVAYYGRDLRGAHLPFNFRLIEAQWDARHIERQIVEYEAALPEGGWPNWVLSNHDKPRIASRVGRDQARVAAMMLLTLRGTPTIYYGDEIGMNDAPIPPERVQDPFELRVPGRGFGRDPQRTPMQWDNTVNAGFSTGSPWLPLAPDKDSFNVEAERSDPHSMLSLYRRLIAFRRENDALNLGRYASVEADSCVLAYLRETENDRYLIALNLGPEPAVLETPGQCRIVISTEGKAEGEIVEEKLHLQGNEGVLAEMMS

SEQ ID NO: 345 - DNA, 3348 bp, Mesorhizobium sp. BNC1
  CDS (1)..(3348): transl_table=11
atgaacacgatggaaaaggtcgcctcggaactcatgtctccagaagaggccgaagctgtccaggtcgtgccgcctgccggcccgcggccgcccgattggtataaggacgcggtcatctatcagctccacatcaaggccttccacgattccaatggcgatggaatgggggatttcaatggcctgatgcagcggctcgattatgtcgaacggctgggcgtcaacaccatatggcttctgccgttctatccctcaccgctccgggatgacggttacgacatcgcggattaccgctccatcaatccttcctacggcaccatgcgcgattttcgccgcttcgtggccgaagcgcaccggcgcggcatccgggtgatcacggaactggtcatcaaccacacctccgaccagcatccctggttccagcgggcaaggcacgccaagaagggttccgccgcgcggcaattctatgtctggaacgacgatgacgagcgctatcccgagacacgcatcatcttcctcgatacggaaaaatccaactggacctgggatccggtcgccggccaattcttctggcaccgcttctattcgcaccagccggatctcaattttgataatccccgggtgctcgacgctgtcatcaggatcatgcgtttctggctggatatgggggtggacgggctgaggctcgacgcgattccgtatctcgtcgagcgcgacgggacgaacaacgagaacctgcccgagacgcatgagatcctgaagaaaatacgaaaggcgctggacgagaaatatcccgaccggatgctgcttgccgaagccaatcagtggccggaggacacgcgcccctatttcggcgagggggacgagtgccatatggctttccacttcccgctaatgccgcgcatctatatggcgctggcgcaggaagaccggcatccgatctccgatatcatgcggcagacgccggaaatcccggaatcatgccaatgggcgattttcctgcgcaaccacgacgaactgacgcttgaaatggtgaccgaccgcgagcgcgactacctttggcgcacctatgcggaggacgtgcgggcgcgcatcaatctcggcatccgccgccggcttgcgccgctgatgcagaacgaccggcgcaagatcgagctgatgaatgcgctgctcttctccatgcctggcacgccgatcgtctattatggcgacgagctcggcatgggcgacaatatctatctcggcgaccgggacggggtgcgcacacccatgcagtgggcgcccgaccgcaatggcggcttctcacgcgccaacccgcaaatgctttacctgccgcccatcatggacccggtctacggttaccagaccatcaatgtggaggcgcaggaggcagatccatcgtcgcttctcaactgggtgcggcgtgtgatcggcgtgcgcaagcaacactcggccttcggacgtggcgatttcaccatgctctatccgagaaaccgccgcatccttgcctatacgcgcagcgatgcaaacgagacgatcctgtgcgtggccaatctctcgcgctcgcctcaggcagtggaactggatctttcgaaataccgcaattgcgtgccgatcgaacttgtcagccagtcgccattcccgccgatcggcgatctgccctacatgcttacgctgacgggttacggtaccttctggttcgtgctcgcgagcgaggcgcaggcgcccgaatggcacaacaatgtgccggagcctttgcctgaattcataacgcttaccatggtggacgggcgcatcgagcgcgcgctggaagggcgcgagcggcggcagctcgaacaggatgttctgccgcaattcatgcagcgccaacgctggtatggcgccaagggcgaggggatacgctccgccgggataagtgatatcgccaaactgggtgatgaaggggggcttctcaccatcgtggatgtcgatctgtccgtctcgggcaggcagcgctacctcctgccgcttaccgtcctctggggcgaagaaaacgtgcagttcggggcgcccaaactttccgtaacgctggcacgtgtgcgcaaaggttcgcgtctcggcgccctgatcgacggcgcctatgacgaccgcttcgcctcggagctgatgcggcggatgcaggaaaaccaggagatgcaggtgccaggcgggactctgcgcttctatggaaatgaacagctcacggccatgcatttcgaggagacgccttcccccctgatgggagagcagagcaatgtgtcagtcgccttcgaccggcaggtgctgctcaagattttccgccggttgaggccgggcgaccagcctgaggtggaggtggcgcgcttcctgacggaggtcgcgggcttcaggaatacgcccgcctttctcggcatggtcgaatatgaggagcagggcgcccgtaccgttctggccagcgtttccggtttcgtcgagaatcagggcgatgcatggggcgtcttcgtgcacgcgctggagcggcagatcgaagacgaaacccttgcaccgcctgccccggccggcgccacgccggctgaggggaccacggcacagctcctctatccgctcgacctgcttcggcgcctcggcgaacgcacgggcgaaatgcacgctgccctcgcgattgaaaccgacatggaggctttccggtgcgagccgatccgccgggcggacatcgcaagctgggtcaaggacctgaaacagcaggcggcgagcgcccgcgcggccctggagcgcaacaaggatcgccttcccctcaacataagggaaagcgtggagcaccttctgtctctgagacaacggatcgacaggcgcatcagcgagttcggaaaaatcacgccttccgggaagaagtcacgcatccatggcgactatcatcttggccaggtgctggtctcaaagcaggacctctacatcatcgatttcgagggtgagccgcgccgaagcctggaggaacgccgcggcaagagctctccgttgcgggatgtggcgggaatgctgcgctccttcgattatgccgcatggacggcggtgcgccaggtcgccgcgcgcctgccggaccagacgcgggatggcagctcgctcgcgcgccaatggcgagagcggatgagcgcggaattcctggaaggataccgcgcggctgcctccgtcgcgcagaaccagccagcagacggagccacatgggaagccctgctcgaacttttcctgttgcagaagggtttctacgaaatcaactacgaactctccaaccggccggactgggtgggcatccccgtgcagggcgtgctcgacctgatcgaaaggaggagcggatga

SEQ ID NO: 346 - protein, 1115 aa, Mesorhizobium sp. BNC1
MNTMEKVASELMSPEEAEAVQVVPPAGPRPPDWYKDAVIYQLHIKAFHDSNGDGMGDFNGLMQRLDYVERLGVNTIWLLPFYPSPLRDDGYDIADYRSINPSYGTMRDFRRFVAEAHRRGIRVITELVINHTSDQHPWFQRARHAKKGSAARQFYVWNDDDERYPETRIIFLDTEKSNWTWDPVAGQFFWHRFYSHQPDLNFDNPRVLDAVIRIMRFWLDMGVDGLRLDAIPYLVERDGTNNENLPETHEILKKIRKALDEKYPDRMLLAEANQWPEDTRPYFGEGDECHMAFHFPLMPRIYMALAQEDRHPISDIMRQTPEIPESCQWAIFLRNHDELTLEMVTDRERDYLWRTYAEDVRARINLGIRRRLAPLMQNDRRKIELMNALLFSMPGTPIVYYGDELGMGDNIYLGDRDGVRTPMQWAPDRNGGFSRANPQMLYLPPIMDPVYGYQTINVEAQEADPSSLLNWVRRVIGVRKQHSAFGRGDFTMLYPRNRRILAYTRSDANETILCVANLSRSPQAVELDLSKYRNCVPIELVSQSPFPPIGDLPYMLTLTGYGTFWFVLASEAQAPEWHNNVPEPLPEFITLTMVDGRIERALEGRERRQLEQDVLPQFMQRQRWYGAKGEGIRSAGISDIAKLGDEGGLLTIVDVDLSVSGRQRYLLPLTVLWGEENVQFGAPKLSVTLARVRKGSRLGALIDGAYDDRFASELMRRMQENQEMQVPGGTLRFYGNEQLTAMHFEETPSPLMGEQSNVSVAFDRQVLLKIFRRLRPGDQPEVEVARFLTEVAGFRNTPAFLGMVEYEEQGARTVLASVSGFVENQGDAWGVFVHALERQIEDETLAPPAPAGATPAEGTTAQLLYPLDLLRRLGERTGEMHAALAIETDMEAFRCEPIRRADIASWVKDLKQQAASARAALERNKDRLPLNIRESVEHLLSLRQRIDRRISEFGKITPSGKKSRIHGDYHLGQVLVSKQDLYIIDFEGEPRRSLEERRGKSSPLRDVAGMLRSFDYAAWTAVRQVAARLPDQTRDGSSLARQWRERMSAEFLEGYRAAASVAQNQPADGATWEALLELFLLQKGFYEINYELSNRPDWVGIPVQGVLDLIERRSG

SEQ ID NO: 347 - DNA, 1653 bp, Silicibacter sp. TM1040
  CDS (1)..(1653): transl_table=11
atgaacgctcagaccacaatcaaccctgcttcggtgctgtccaatgacccggattggtggcgcggtgcggtgatctaccagatttatccgcgcagctaccaagacagcaatggcgacggcatcggggatctgcagggtatcacgtcacgtctggaccacatcgcctctcttggggtggatgccatctggatttcgccctttttcacgtcaccgatgaaagactatggctacgatgtcagcgactactgcgatgttgatccgatgtttggcaacctcgcagattttgacgcgctggtggcgcgggcgcatgatctcggcctgcgggtgatgatcgatctggtgctgtcgcatagttcggatcagcacccttggttcgccgagagccgtcagagccgcgacaacccaaaggccgactggtacgtctgggccgatccccaagaagacggcacgccgccgaacaactggctgtcgatctttggcggttccgcctggcattgggacgcgcgccgcgagcaatattatctgcacaattttctggtctcgcagcctgacctaaatttccattgtccggacgtgcagaatgcgcttttggatgtgacccgcttctggctcgagcggggagtcgatgggttccgcttggacaccatcaatttctacatccacgacaaggagttgcggtcgaacccagcgcttcccaaggatcagcgcaatgccaatatcgccccttcggtgaacccctataaccatcaggaacacctctactccaagaaccagccggaaaacctcgattttctcgcgcggttccgtgcgcttttggacgaatacccggccaagaccgcggttggcgaagtcggcgatgcgcagcgcgggctggaactattgggacagtacacggccggcaacaccggtgtccacatgtgctatgccttcgagttcctggccaaagatccgctaaccgccgcgcgcgtggctgaggtttttgagcgcacagatgaggtagcagccgatggttgggcctgttgggccttctccaaccatgatgttcagcggcacgtcagccgatgggggttgtcggacgctgcgctgcgcctccatgcgactttgatcatgtgcctccgcggctctgtctgcatctatcagggcgaagaactggggctgccagaggccgatatttcctttgaagatctgcaagatccctatgggattgagttctggcctgaattcaaaggacgcgatggatgccgcactccgatggtctggcgcagcgacaatacgcatggcggcttctccgaggcgcgtccttggctgccggtcagcctcgagcatgcggcgctgtccgtagcagagcaagaagcaaaccccgatgcgttgctgcaccactaccgccgcgtgattgccctgcgacgcgcccacgcggcactgtcgcacggaacccacgacaaggtcgtggcaagcgggtctgtcgttcattttctgcgcagcgccgagtccgaggacatcttctgtgccttcaatcttggcgaggcggcggcagaggtcagcttgcccgcgggaacgtgggagcagcttggtgctgacatcggcactgccgaaatcaatggtgatctggtgaaacttggcccttggcaagcctgcctcgtacggcgcgtataa

SEQ ID NO: 348 - protein, 550 aa, Silicibacter sp. TM1040
MNAQTTINPASVLSNDPDWWRGAVIYQIYPRSYQDSNGDGIGDLQGITSRLDHIASLGVDAIWISPFFTSPMKDYGYDVSDYCDVDPMFGNLADFDALVARAHDLGLRVMIDLVLSHSSDQHPWFAESRQSRDNPKADWYVWADPQEDGTPPNNWLSIFGGSAWHWDARREQYYLHNFLVSQPDLNFHCPDVQNALLDVTRFWLERGVDGFRLDTINFYIHDKELRSNPALPKDQRNANIAPSVNPYNHQEHLYSKNQPENLDFLARFRALLDEYPAKTAVGEVGDAQRGLELLGQYTAGNTGVHMCYAFEFLAKDPLTAARVAEVFERTDEVAADGWACWAFSNHDVQRHVSRWGLSDAALRLHATLIMCLRGSVCIYQGEELGLPEADISFEDLQDPYGIEFWPEFKGRDGCRTPMVWRSDNTHGGFSEARPWLPVSLEHAALSVAEQEANPDALLHHYRRVIALRRAHAALSHGTHDKVVASGSVVHFLRSAESEDIFCAFNLGEAAAEVSLPAGTWEQLGADIGTAEINGDLVKLGPWQACLVRRV

SEQ ID NO: 349 - DNA, 3267 bp, Nitrobacter hamburgensis X14
  CDS (1)..(3267): transl_table=11
atgaacgagatgaccaaaatcgatgctgaccgatatgtccagaccgacgatctctggtacaaggacgccatcatctatcagcttcatgtcaaggccttcgccgacagcaacaacgatggcatcggcgacttcgccgggctgaccaacaagcttgactaccttcaggaactgggcgttacgacgctgtggctgctgccgttctatccgtccccgggacgcgacgatggatacgacatcgccgattacggttcggtcaaccccgacttcggcacgatgaaggatttccgtcgcttcatctccgaggcgcggcggcgcggccttcgggtgatcacggaactcgtcatcaatcacacctccgaccagcacagatggttcaaacgcgctcagcgcagcccgcccggatcgagcgcacgcaactggtatgtctggagcgacaccgacaaaaaataccaggacacgcggatcattttcaccgacacggaaaaatcgaactgggcctgggatgccgaggccaaggcttactactggcatcgtttcttcacgcatcagccggacctcaatttcgacaatccgcgcgtggtcagggcggtcattcaggtgatgaagcgatggctcgacgcaggcgtcgacggctttcggctggatgccattccctacctctgcgagcgcgacggcaccaacaacgaaaatcttcccgaaacccatgcggtgatcaagcacattcgtgcggagctcgacgcctacgccaagggcaaggtgcttctggccgaagccaatcaatggccggaggatgtccagtcctatttcggcgatggcgacgagtgccatatggcctatcatttcccgctgatgccgcgcatctatatggcgatcgcgcaggaggatcgctttccgatcaccgacatcttgcggcagacgcccgatatcccgcccaattgccaatgggcgatgttcctgcgcaaccatgacgagctgacactcgaaatggtgacggacatcgagcgcgattatctctggtcgatctatgccgccgatccacgcgcacgcatcaatctcggcattcgccgccgcctcgcgcctttgatggacaatgaccggcggaaaatcgagctgatgaattcgttgctgatgtcctttcccggcacccctatcatctattacggcgacgaaatcgggatgggcgacaacatctatctcggcgaccgcaacggcgtccgtaccccgatgcaatggacgccggaccgcaacggcggcttttcgcgatgcgatcccgcgcggctctatgcacctccggtcatggacgccgtctacggctacgagtccgtcaatgtcgaagcacagtcgcgaagcctgttctcgctgttgaactggatgaaaaagctgatctcggttcgcaaatcgagccacgtcttcggccgtggcaccatgtccttcgtgcgctcctcgaatcgcagcgttctcgcttacgtgcggaaaaataacgacgaggtcgtgctctgcgtcgccaacctgtcgcgatcggcacaggcttccgaactcgatctgtcgcactggaaaggccgctcgccgatcgaaatgctgggacgaacgacgtttcccgatatcggcgaactgccttatctgatcacgctcgcgccttacggtttctactggttccgcctgaccgaaaagccgccgtcgccgaacgttgcggcggtgatcgttcccgactatgagaccctcgtggtgccgctgggcgcgacctggatgtcactggcgcggacccgctcgatcttcgagcgcgatgtcctgccttcgcatctcgcccgctcgcgctggttccccgagcggtcggccagcgccatcgccgcgcgtgtcccggcagcgataccgctcatgaaagaccaggtttcacggccatggctggtgatcttcgacgtcacccatcgcgggcagtcggggcgatacgcgatgccgatccgaatccgatgggatcggctcgaccgccgcaactatgacgccaaaaacatcgccgccgtgcggcaggggtcgcgcgagggaacgctgatcgacgccgcctatgagaacgacctgatcgccggcatcatcgacggtctgcgccaccggacgacctttgaggaaggcgaattgcggcttgcctaccatcccacggaacggctggcctcgattgcagaggagccgattggcaacgtgcgcgcggtgcagaccgaacaatcgaacagcaccgcgctggtagaccagaggttcgtcgtcaaaatctatcgcaagcttgaaaacggtatcaatccggaagtggaagtcgggcgcttcctgacggacgtcgccggattcgccaatacgcccgccctgctcggcagcgccgaactgaccggccccgatgtccaggccgccgttgccattgtccatgcctttgtcggcaaccagggtgacgcatggaccgtcagcaacgctgcactggatcgctttatcgacgagcagcggctggtcggcgctagcgattcggctccggcgcttgaagagaaggcggcgtatcagcgctcgatgaagcagatcggcaagcgcgtcgcggaaatgcacgtcgcgctggccagccgcaacgacatcgcgaatttccgtcccgaacctgtaacgccttcggacctcgcgcacctcatcgatcgtttgatgatgcgcgccgggcaaacgttcgaccgcctcgctcaagtcaagcttgccgattcggatcggcttcttgccgatgaaattctgagcatccgtccaacgttgcatggccggctcaccgagctgctgccgccctcgattcaaatgtacaacattcgacatcacggtgactttcatctcgggcagatcctcgtcgtccgcgacgatgtctttatcatcgactttgaaggcgaaccccgccgaagcctccccgagcggcgattgaaagcgccggcggcccgcgatgtcgccgggctgatccggtccatcgactattccgtcaccacagcgcaagagcgcgtcctcaagaccggaacggacgacgacggacgactggccgaggctttgtcggcatggcgcaacgaggcgacgcaaaccttcctgaccgcctaccgcgaagcgatgtccgatccccggctatggccgcaggataacgaccacgccgacaggacgctgcggttcttcctgctcgaaaaggcgttctatgaaatcgactacgagctcgcgcatcgcccggactggcttcgtgtcgcattgggcggcgcacttcgcgtgctgcgcaaatag

SEQ ID NO: 350 - protein, 1088 aa, Nitrobacter hamburgensis X14
MNEMTKIDADRYVQTDDLWYKDAIIYQLHVKAFADSNNDGIGDFAGLTNKLDYLQELGVTTLWLLPFYPSPGRDDGYDIADYGSVNPDFGTMKDFRRFISEARRRGLRVITELVINHTSDQHRWFKRAQRSPPGSSARNWYVWSDTDKKYQDTRIIFTDTEKSNWAWDAEAKAYYWHRFFTHQPDLNFDNPRVVRAVIQVMKRWLDAGVDGFRLDAIPYLCERDGTNNENLPETHAVIKHIRAELDAYAKGKVLLAEANQWPEDVQSYFGDGDECHMAYHFPLMPRIYMAIAQEDRFPITDILRQTPDIPPNCQWAMFLRNHDELTLEMVTDIERDYLWSIYAADPRARINLGIRRRLAPLMDNDRRKIELMNSLLMSFPGTPIIYYGDEIGMGDNIYLGDRNGVRTPMQWTPDRNGGFSRCDPARLYAPPVMDAVYGYESVNVEAQSRSLFSLLNWMKKLISVRKSSHVFGRGTMSFVRSSNRSVLAYVRKNNDEVVLCVANLSRSAQASELDLSHWKGRSPIEMLGRTTFPDIGELPYLITLAPYGFYWFRLTEKPPSPNVAAVIVPDYETLVVPLGATWMSLARTRSIFERDVLPSHLARSRWFPERSASAIAARVPAAIPLMKDQVSRPWLVIFDVTHRGQSGRYAMPIRIRWDRLDRRNYDAKNIAAVRQGSREGTLIDAAYENDLIAGIIDGLRHRTTFEEGELRLAYHPTERLASIAEEPIGNVRAVQTEQSNSTALVDQRFVVKIYRKLENGINPEVEVGRFLTDVAGFANTPALLGSAELTGPDVQAAVAIVHAFVGNQGDAWTVSNAALDRFIDEQRLVGASDSAPALEEKAAYQRSMKQIGKRVAEMHVALASRNDIANFRPEPVTPSDLAHLIDRLMMRAGQTFDRLAQVKLADSDRLLADEILSIRPTLHGRLTELLPPSIQMYNIRHHGDFHLGQILVVRDDVFIIDFEGEPRRSLPERRLKAPAARDVAGLIRSIDYSVTTAQERVLKTGTDDDGRLAEALSAWRNEATQTFLTAYREAMSDPRLWPQDNDHADRTLRFFLLEKAFYEIDYELAHRPDWLRVALGGALRVLRK

SEQ ID NO: 351 - DNA, 1926 bp, Shewanella denitrificans OS-217
  CDS (1)..(1926): transl_table=11
atgaaaaaattgaccttcactgtggctaccaccctgcttatgagtgcgatgaatttagctattgcagcgcaaagcccctcctcctttaccatcaatgctgagcctatgttttggtgggcgggaatggaaaatagtcaactagagctcttgatagaaggcgacaatgttgcggccttgacccctaagcttagccaacagcaaggcattacattagtcaagactgagcgcagcactagcccaaaccatttgtttgttactctggatctgcatcaagcccagccgcaaacattaaccattgatttttatgaattaaacaatcctaaaaaacccgctacagcgacattagcctatcaactaaaaccaagaacatcagactcaaagcagcgccaaggctttagcaataaagacgtgatataccttattaccccagacagattcgccaatggcaacccagataacgataaccataccaccatgttggaaaaggtgaaccgcagcgataaagatggccgtcatggcggcgacatccagggcataatcgaggcgctgccttatttagccgacttaggtgtgactcagctatggataaacccactactggaaaataaccaagaaaagtattcttaccatggttattccatcacaaacttttatcgaatagacccccgctttggcagcaatcaggactatgtcaatctagttcaacaggcgaataaattggggattggggtaattaaagacatagttgtcaatcatatgggcagcggtcatccttggatgacaaatttccccagcgccacctgggtcaacggccaagcaagtttgcagcaacaactgccattggattttaccaaccatagacgcaccacagtgcaagacccctatgccgcgagcaccgacacccaagccttcagcgacggctggtttaccgataccatgcctgacatgaaccagaccgaccctcactttgccacctatctcattcagaacagcatctggtgggtggagtacgcaggtttgagcggcattcgagaagacacttactcttatgctgataaagctttcttaactcagtggtctaaggccatcatgaccgaataccccaagttcaatattgtcggtgaagagtggagtcctaaccccatcaccgtcagctattggcaggcgggcaagcataataaagatggctatgtctcccatgtacctagcatgatggacttccccttgtatgagaaacttatcgcctcgctcacccaagtcgaaggctgggacacgggcctagtcaacctctatgagatgctcgccaacgatgtggtttatgccgaaccgacccaattggtgctgtttgaaggcaatcacgacaccaatcgcctctatagcttgatgaatgaagatcttgccctgtttaagatggccatggcttatgtgctcacgagtaatcgcattccacagattttttatggcacagaagtgttgatgacaagccccactaaagacagaaacgatggcctagttcgcagtgattttcccggtggttggcaaggcgatagccaaaatgccatcacaggcgataacctcagtccagctcaaatcgaagctcaacattttatcaagaccttgctcaattaccgtaagcactcagacgctatcataaacggcacccttagccattacgcccctcaagacggtgtgtatgtgcaattcagacaagctggggatgaaaccttgatgagtatctacaacaaaaattcggccccagtgaatttagccttaggccgttttgccgagcatataggcaagcacactcaagccagcaacatccttgaacacacagagtttgacttaaatgacagcatatcgctcacaaaaaaaggcgtgactctgctcaaattaagtacgctcaaattaagtacccacaagccctag

SEQ ID NO: 352 - protein, 641 aa, Shewanella denitrificans OS-217
MKKLTFTVATTLLMSAMNLAIAAQSPSSFTINAEPMFWWAGMENSQLELLIEGDNVAALTPKLSQQQGITLVKTERSTSPNHLFVTLDLHQAQPQTLTIDFYELNNPKKPATATLAYQLKPRTSDSKQRQGFSNKDVIYLITPDRFANGNPDNDNHTTMLEKVNRSDKDGRHGGDIQGIIEALPYLADLGVTQLWINPLLENNQEKYSYHGYSITNFYRIDPRFGSNQDYVNLVQQANKLGIGVIKDIVVNHMGSGHPWMTNFPSATWVNGQASLQQQLPLDFTNHRRTTVQDPYAASTDTQAFSDGWFTDTMPDMNQTDPHFATYLIQNSIWWVEYAGLSGIREDTYSYADKAFLTQWSKAIMTEYPKFNIVGEEWSPNPITVSYWQAGKHNKDGYVSHVPSMMDFPLYEKLIASLTQVEGWDTGLVNLYEMLANDVVYAEPTQLVLFEGNHDTNRLYSLMNEDLALFKMAMAYVLTSNRIPQIFYGTEVLMTSPTKDRNDGLVRSDFPGGWQGDSQNAITGDNLSPAQIEAQHFIKTLLNYRKHSDAIINGTLSHYAPQDGVYVQFRQAGDETLMSIYNKNSAPVNLALGRFAEHIGKHTQASNILEHTEFDLNDSISLTKKGVTLLKLSTLKLSTHKP

SEQ ID NO: 353 - DNA, 1419 bp, Thermotoga neapolitana
  CDS (1)..(1419): transl_table=11
atgtatcccataccaagttgggtatacgacagtgttgtgtaccagatattcccggacaggtttttcatcggcaaaggaaagaccgtcgaggacaaaaaagatctttatctgaaacgagggggaaccatcgaaaaatggggggttcctcctcgaaaacttcccggtgctcagcacgtgaaggtcttctacggaggagatctatggggaatagcagagaagatcgattacttagaagaactcggagttaacgcagtttacctcactcctatctttctttccgatacaaatcacaaatacgatacgatagattatttcaagatcgatccacagttcggaggaaaacgagcctttgtacaccttctgaaagttcttcacagcaggaacatcaaactcattctggacggtgtgttcaaccacgttggaagtcagcatccctggttcaaaaaggcaaggaagaaagatcctgaatacgtgaaccgtttctttctttacagagacaggcacagatcttggttcgacgtgggaagtttgcccgaactgaacgtggaagttgaagaggtgagagaatacatattgaaagtcgttcaacactacctggaagtgggtgtggacggctggaggctcgactgtggtcacgaccttggacctctggtcaacctgtggatcaacatgaaagtaaaggaattctcttctgaaaagtatcttgtgagcgagatatggacctacccggcaggatgggaaatggtcgatggattgatgaactacaatttcaggagccttgttttgagctatgtgaacggagaaacggattctatagggacagaactcgaaagggcttacagagaaacaaagaacatcttcgggtgctggaacatgctagacagccacgatactccaaggcttgcaacgacggtcccagtcaaagatctcagaaaactcgctatagtgcttcagttcacatatccgggcgttccgctcgtctattacggaacagagataggcctcacaggtggagaagatccggagtgtcgagccaccatggaatggaacagggaaaagtgggacatggagttgtttgagttttacaagaagatgatcaggttcaggagaaccgatcctggtttgaggtttggcgagttcatacttttgaaagaaaagccacttgccttcatgaggaaagccccgcatcctcttcaagacacgatcgttgtggtgaatcctgaagaggaaaaaaacgttgttctctcccttccggatggaaagatcatgaacgcaactcctcttttcgacatcttcaccggtgagaagttccatgtggatggaggagtcgtgaaggtgcccgttggaagaagatcgttcaggatcttaaagccgatcgacctcagagttggaaggtacagattgtacaagagagtgtga

SEQ ID NO: 354 - protein, 472 aa, Thermotoga neapolitana
MYPIPSWVYDSVVYQIFPDRFFIGKGKTVEDKKDLYLKRGGTIEKWGVPPRKLPGAQHVKVFYGGDLWGIAEKIDYLEELGVNAVYLTPIFLSDTNHKYDTIDYFKIDPQFGGKRAFVHLLKVLHSRNIKLILDGVFNHVGSQHPWFKKARKKDPEYVNRFFLYRDRHRSWFDVGSLPELNVEVEEVREYILKVVQHYLEVGVDGWRLDCGHDLGPLVNLWINMKVKEFSSEKYLVSEIWTYPAGWEMVDGLMNYNFRSLVLSYVNGETDSIGTELERAYRETKNIFGCWNMLDSHDTPRLATTVPVKDLRKLAIVLQFTYPGVPLVYYGTEIGLTGGEDPECRATMEWNREKWDMELFEFYKKMIRFRRTDPGLRFGEFILLKEKPLAFMRKAPHPLQDTIVVVNPEEEKNVVLSLPDGKIMNATPLFDIFTGEKFHVDGGVVKVPVGRRSFRILKPIDLRVGRYRLYKRV

SEQ ID NO: 355 - DNA, 1701 bp, Bacteroides thetaiotaomicron
  CDS (1)..(1701): transl_table=11
atgaaaaggaatttattattcattatcttactattattattacccggtcttcaccaggtattcgcaacaagcactataaagaaagtagccccgaccttttggtgggcaggaatgaagaatcccgaattgcagatactattatatggtgaccgcatatcatccgcagacgtcagtctttctgccgataatatcacgctgcaagaagtggtgaagcaggagaatcctaattatctggttctgtatttagacctttcgaaggctgctccacagaactttgacatcatcctgaaacaaggcaaaaagcagataaaaatcccttacgagcttaaacagcgccggccgaatgcttcggcagtagaaggttttgattcgagcgacgtgctttatcttattatgccggaccgttttgccaatggcaacccctccaacgacatcattcccggaatgctggaaggaaatgtagaccgtaatgagcctttcgcacgtcatggcggtgatttgaaaggaatagagaatcatctggattacatagcagacctcggagtcaccagtatatggctcaacccgattcaggaaaatgacatgaaagaaggatcgtatcacggttatgccattaccgattattatcaggtagaccgccgcttcggcagtaacgaagagttccgcaaacttactcaggaagctaatgccaaagggctgaaagtcgtaatggacatgatcttcaaccattgcggttcggacaactatctgtttaaagatatgccctccaaagactggtttaactttgaaggcaactacgtgcagaccagcttcaagactgccactcaaatggacccgtatgcttccgattacgaaaagaaaatcgctatcgacggttggttcacactgaccatgccggacttcaaccaaagaaaccgtcatgtagctacttatctgatacagagcagtatctggtggattgaatacgccggtatcaacggcatccgtcaggatacacacccttatgccgacttcgatatgatggcacgctggtccaaagcggtcaatgaagaatatcccaagttcaacattgtaggtgaaacatggctgggcaacaatgtactcatctcctactggcagaaagacagcagactcgcttatccgaagaacagcaatctcccgactgtcatggacttcccgctaatggaagagatgaacaaggctttcgacgaagagactaccgaatggaacggaggacttttcagactctacgaatatctatcacaggacatcgtctacagccatccaatgagcctgctgaccttcctcgacaatcacgatacttcccgcttctaccgttcggaagcagatacaaagaatctggaccgatacaagcaagccctgacgttcttactgacaacccgcggaataccgcagatatattatggaactgaaatcctgatggcagccgacaaggcgaatggagacggcctgctccgctgcgacttccccggaggctggccgaacgatacaaaaaactgctttgacgcagccaaccgcactccacagcaaaatgaagcattctcctttatcaaaaactgctccaatggagaaaaggaaacgaagtcattgccaaaggtcagctcaaacatttcgcaccgaataaaggtgtctacgtttacgaacccaaatacggtgataaatcagtcgttgttttcctga

SEQ ID NO: 356 - protein, 566 aa, Bacteroides thetaiotaomicron
MKRNLLFIILLLLLPGLHQVFATSTIKKVAPTFWWAGMKNPELQILLYGDRISSADVSLSADNITLQEVVKQENPNYLVLYLDLSKAAPQNFDIILKQGKKQIKIPYELKQRRPNASAVEGFDSSDVLYLIMPDRFANGNPSNDIIPGMLEGNVDRNEPFARHGGDLKGIENHLDYIADLGVTSIWLNPIQENDMKEGSYHGYAITDYYQVDRRFGSNEEFRKLTQEANAKGLKVVMDMIFNHCGSDNYLFKDMPSKDWFNFEGNYVQTSFKTATQMDPYASDYEKKIAIDGWFTLTMPDFNQRNRHVATYLIQSSIWWIEYAGINGIRQDTHPYADFDMMARWSKAVNEEYPKFNIVGETWLGNNVLISYWQKDSRLAYPKNSNLPTVMDFPLMEEMNKAFDEETTEWNGGLFRLYEYLSQDIVYSHPMSLLTFLDNHDTSRFYRSEADTKNLDRYKQALTFLLTTRGIPQIYYGTEILMAADKANGDGLLRCDFPGGWPNDTKNCFDAANRTPQQNEAFSFIKNCSNGEKETKSLPKVSSNISHRIKVSTFTNPNTVINQSLFS

SEQ ID NO: 357 - DNA, 3906 bp, Alicyclobacillus acidocaldarius
  CDS (1)..(3906): transl_table=11
atgcacgtgaagtggacgggtgccgcgagccttgcgacgaccatcgtcatgtctgcagcgcttccgttcgcggcgtttgaaaacacccgttccgtcggcacggaacgcgttctggcggcgaccgcggcggatagtactaacgcctcgcccccgaccggggcgtccgcaggcggtggcacagcaggagagacctactcgaatgccgtgcagattgtgagcggcaatggctttcgcgctggaaacggggccacggtcgtcctcgctgtgaatggactgaacttgaacccctcgagtttcaaggttgtggtatcgaatagcctcaacggcgtgatcgacgtcacaagtgattccgtgctaacggggccgaattcgattgccttgcaccttcctgccggggatgacgggcttggcgccggtacgtacacggtcaccgtcgaaagtggaggtgattcggtctcgacgccttcaggacagggacttcaggtcatgccttatacgacggccgacaccattcagtgggatggaatctacacatccgatggcgcgatgtacgtgtcagatccgaatccctcccctggacaagaggtgacgatcagccttcgagcgtacagcgggaacctgacgaaggtgatcctgaattgctgggacaccgcacaaaacaagggtttccaggtcgagatgtctccaggcagaacgtttggaccgtatcagctctggtctgccacgatccccgcttcaaacggcggaacgatctattatcgctttgacatatacgatggcaccagttttgcgtgtctctcaggtgacggactgcacacgtctgacgacatcaacaacaatttcccgttgcccgtggggacggtcacgctttcgacacttcaggcgaatcccggtgatacggtgacggtctccgaccctgtaggtgacttcgccggaagccaggatcaacccaatcacacggtgatacggtttgtcaactcgtcgggcgaaacggccgccacagtcaatgggacgaacgcgagctggaacagcgtgcagttcacagtcccacagagccttccaaacggcttgtatcgcgtcgagatcgacacggtcgccaaggacgcggatggggtggtcaatgtcgaattggacaggagtgcggagcttattgtagggcctctgcccgcgtggatgcaagcgtatgcacatgattcgtttcaggcgttctaccgatcgcctttcggagccgtgtccacaggaacccccatcacgcttcgcctgcgggctccgctcagcgtgaagagtgcgacgcttcgcctctggggggcagcggatcagtcaggcgagatcgacctgccgatgcagaagctccaaatgtcgggagacgagttggcgcaacaaaccggcgtgcaggacatcaacgactacacgtggtggacggtgaccatccctgcggcggatgtgaccacacccgggacgatgtggtatcagttcgtgacggagacggacactggccaggtggtctactacgatgacaatggagctcagcttgaagggcctggccaggttgggttgtcttccgacggaccgagctaccagatcagcgtatacgaacggggatttcagacgccagattggctgaagcacgccgtgatctacgaaatcatgccggatcggttctacaatggcaatatcgccacggaggagaatccgaatacgcaaaaggggatttatgtaggggccgatggaacggagtcattaggccccatccagttccacgagaactgggactcgccgccctatgatccgaatattcctccgttatctgatcccaaaattgccagtctgcgaggcaatggccaatggaacattgactttttcggaggtgatttgcagggcatcgaggataagctggactacctgaagagccttggagtcaatacgctgtatctgatgcccgtctttgaggcggaatccaatcacaaatatgacacagccgactatttcaagattgaccctggatttggaacgcagcaggactggctgaatctcgtacaggctgcgcacgcgaaggggttccatatcattctcgacggggtgttcgaagataccggaagtgacagcgtatatttcaacaagttcgggaacttccactccaacggtgcgtggcaggcgtacctgaagaaccagccgtcgctgtcgccctactactcgtggtacgtgtggacagggaacacctcaaacccatacgattcgtggtttcagatcgacacgctgccacttacggacacgtcgaaccccgcctatcagcgattcgtgtatgggagcgacaactcagtcgcgcgtgtgtggatccgggaaggtgcggacggatggcgcttggactcggccgacaacgggaatttcaacacggcatggtggggtggctttcggcaggccgtgaaatcgatcgatcccaacgcagcgatcatcggcgagatctgggacaatgcgacgaatgacaatggaacggattggttgacgggatcgaccttcgacagtgtaatgaactaccagttccggaacgccgtgatcgacttcttccgcggcacgtacaacgacggaaacgtgcagcaccacgccgtcgacgctgcgggattcaaccaggaactgatgcgcctgtacagtgaatatcctctgcagtcgttctactcgatgatgaaccttgtcgattcgcaagacaccatgcggatcctgaccatcttggagaacgcgccgcagccaggcgatctatccgcgctccagcaggatgagtacaggccgtctcctgcggctgaacagttggggatcgagaggctgaagcttgtatcggactttcaattcagcttcccgggcgatccgaccatcttctacggcgacgaggcagggctcactggttattcggatcccctcaatcgtcggacctatccgtgggacaaccagaatctcgatctcctgaaccactaccgcaagctcggggccattcgaaacgccaatcctgtgcttcagacgggggatttcacgccgttgtacgcacagggcatggtgtacgcatttgcaaggaccattcggaatgggcgagatgtcttcggtgtgccagcggaggatgccacggccattgtggcgatcaacaatcagaaccaagctatcaccgtgaccattccgacggatgggacggttgcggacgggtccacgatgctcgatgaactgaacaaccagtggtacaaggtgcagaatggtggcattacactcacgctgcaatcgtatcaaggtgccattttggtgacgccgagcgacgcgccgatggcttatctgcaagaggaggattctcagaacgagattgcgtggacgcctgtgcaaggtgccatcggttatcgcgtctggagacagaatccgaatggacaatgggtgccctttggacctgtgcttcctgccacggacttgagtgtcacggtggaacgcgatgcatatgcgcaaacgtttgctgtacaagcgctgttttcggcgtctgatcacgcccagtctccggtgtcggcacctaagacggtatcgcttgccgtcgatgtgcccgcggtacgcctgagtcagccgatcgttagtggtcgtgtggttggagatcgtgcgatggtctcgatcacgccggtttcaggcgcgacgcagtatgtgatctaccagagacagggcgacggatcgtatgctccggtcgcgacggtctccacaagtggcgattccgcagctataggggaagttcctgcgcaaggtccggccaactcgcctcacgcgacgattcgcgtgacagtgcccgtacctgcaggtttctcgtcggtgacctaccgcgtggctgcgcaaaacgaagatgggcaagctgtgaccaatccattgaccctatcgctctcgaaaaagtga

SEQ ID NO: 358 - protein, 1301 aa, Alicyclobacillus acidocaldarius
MHVKWTGAASLATTIVMSAALPFAAFENTRSVGTERVLAATAADSTNASPPTGASAGGGTAGETYSNAVQIVSGNGFRAGNGATVVLAVNGLNLNPSSFKVVVSNSLNGVIDVTSDSVLTGPNSIALHLPAGDDGLGAGTYTVTVESGGDSVSTPSGQGLQVMPYTTADTIQWDGIYTSDGAMYVSDPNPSPGQEVTISLRAYSGNLTKVILNCWDTAQNKGFQVEMSPGRTFGPYQLWSATIPASNGGTIYYRFDIYDGTSFACLSGDGLHTSDDINNNFPLPVGTVTLSTLQANPGDTVTVSDPVGDFAGSQDQPNHTVIRFVNSSGETAATVNGTNASWNSVQFTVPQSLPNGLYRVEIDTVAKDADGVVNVELDRSAELIVGPLPAWMQAYAHDSFQAFYRSPFGAVSTGTPITLRLRAPLSVKSATLRLWGAADQSGEIDLPMQKLQMSGDELAQQTGVQDINDYTWWTVTIPAADVTTPGTMWYQFVTETDTGQVVYYDDNGAQLEGPGQVGLSSDGPSYQISVYERGFQTPDWLKHAVIYEIMPDRFYNGNIATEENPNTQKGIYVGADGTESLGPIQFHENWDSPPYDPNIPPLSDPKIASLRGNGQWNIDFFGGDLQGIEDKLDYLKSLGVNTLYLMPVFEAESNHKYDTADYFKIDPGFGTQQDWLNLVQAAHAKGFHIILDGVFEDTGSDSVYFNKFGNFHSNGAWQAYLKNQPSLSPYYSWYVWTGNTSNPYDSWFQIDTLPLTDTSNPAYQRFVYGSDNSVARVWIREGADGWRLDSADNGNFNTAWWGGFRQAVKSIDPNAAIIGEIWDNATNDNGTDWLTGSTFDSVMNYQFRNAVIDFFRGTYNDGNVQHHAVDAAGFNQELMRLYSEYPLQSFYSMMNLVDSQDTMRILTILENAPQPGDLSALQQDEYRPSPAAEQLGIERLKLVSDFQFSFPGDPTIFYGDEAGLTGYSDPLNRRTYPWDNQNLDLLNHYRKLGAIRNANPVLQTGDFTPLYAQGMVYAFARTIRNGRDVFGVPAEDATAIVAINNQNQAITVTIPTDGTVADGSTMLDELNNQWYKVQNGGITLTLQSYQGAILVTPSDAPMAYLQEEDSQNEIAWTPVQGAIGYRVWRQNPNGQWVPFGPVLPATDLSVTVERDAYAQTFAVQALFSASDHAQSPVSAPKTVSLAVDVPAVRLSQPIVSGRVVGDRAMVSITPVSGATQYVIYQRQGDGSYAPVATVSTSGDSAAIGEVPAQGPANSPHATIRVTVPVPAGFSSVTYRVAAQNEDGQAVTNPLTLSLSKK

SEQ ID NO: 359 - DNA, 1797 bp, Klebsiella oxytoca
  CDS (1)..(1797): transl_table=11
atgattacaattagttcattaagccactccgcaaagagtgccgatagctacgcttataataaagaaaccctacatattagatttcgcacagtcaaaggcgaggtcgcgaaagtctctctgtggatcggcgatccctatcaatgggaggaaggtggcctagatggtggaaaccttggcggcagcgacgcgcatggatggagcggcggcaacgaagttcacatggaaaaagagggacaaagcgagagctatgaccactggtttgccgcatttactccgtgcaaacgacgtagccgctatggttttatattatacggaaataacggggaaaaattattatttggtgaacgacgctgtgttgatataagtaaaccacctgtagcagagacagaactgagtaacttgtccaactttttttgcttcccttatatcaatccaggtgatgtactttctacgccagaatgggttaaaaaaacaatatggtatcagatctttcctgaacgattttgcaatggcgatccatcgatatcgccagaaaacgtacaaccgtggggaacgcctccagattcaaaaaactttatgggcggtgatttgcagggcattattaacaaacttgattatttgcaagatcttggcgttaacggtttatacctttgtcccatatttacggctaacgctagccataaatatgataccgtagattattttaacgttgatccccatttcggtggcaacgatcggtttaaagaattggtgcaaaaagctcaccaacgaggaatgaaggtcatgctggatgcagtgtttaatcatattggtaatcaatcaccattatggttagatgttgtaaaaaatggtgataaatcaccttacgcagactggttctggattaaaaaattcccggtatacccatctggtgataaaaatgagtgggatttccgtaatttcaattacgaaacctttggtaatgttattgaaatgcctaaacttaatactgaaaaccccgcttgtcgtgattatctgctgcaggtggcgagatattggattgaagaatttgatattgatggctggcgccttgatgttgccaatgaagtcgaccacgaattttggcgagctttccgtagaacggtaaaaagcataaaacctgattgttatattctcggtgaaatttggcatgaaggcatgccatggctgcgcggagaccagtttgactccttgatgaactatcctctaatgcaagcaactactgactatttcgctttacaagcatatgacaaaaaaacatttatagatattgttacccatgcctatctttgctatccacgtaacgttaatgaagttatgtttaatcttcttgaaagccatgatacttcacgtttattaagtctgtgtggtaatgataaacgtaaagcccggttagcctatctctttatgtttagtcaggtgggttctccttgtatttattacggtagcgaagttggtatgaatggcagcagagcaatgggatcggaagataatcgtaaatgtatgatatgggatgaacaaaagcaggatttagagtttaagtcatttattaaagatcttattctatggaggaaaaaacattccgaatggaatgatcctaaaatacactggaataatgtcgaccatccggcagttgtcgcttttagcagaggagaagtacatttcctccttaataatagtgatgaatctttagctattaattatcagggcagaacactatctctgacaccttttgggttttatattatcggtctggaccataaggacatcatatcatga

SEQ ID NO: 360 - protein, 598 aa, Klebsiella oxytoca
MITISSLSHSAKSADSYAYNKETLHIRFRTVKGEVAKVSLWIGDPYQWEEGGLDGGNLGGSDAHGWSGGNEVHMEKEGQSESYDHWFAAFTPCKRRSRYGFILYGNNGEKLLFGERRCVDISKPPVAETELSNLSNFFCFPYINPGDVLSTPEWVKKTIWYQIFPERFCNGDPSISPENVQPWGTPPDSKNFMGGDLQGIINKLDYLQDLGVNGLYLCPIFTANASHKYDTVDYFNVDPHFGGNDRFKELVQKAHQRGMKVMLDAVFNHIGNQSPLWLDVVKNGDKSPYADWFWIKKFPVYPSGDKNEWDFRNFNYETFGNVIEMPKLNTENPACRDYLLQVARYWIEEFDIDGWRLDVANEVDHEFWRAFRRTVKSIKPDCYILGEIWHEGMPWLRGDQFDSLMNYPLMQATTDYFALQAYDKKTFIDIVTHAYLCYPRNVNEVMFNLLESHDTSRLLSLCGNDKRKARLAYLFMFSQVGSPCIYYGSEVGMNGSRAMGSEDNRKCMIWDEQKQDLEFKSFIKDLILWRKKHSEWNDPKIHWNNVDHPAVVAFSRGEVHFLLNNSDESLAINYQGRTLSLTPFGFYIIGLDHKDIIS

SEQ ID NO: 361 - DNA, 1581 bp, Bacillus sp
  CDS (1)..(1581): transl_table=11
atgaaacagctatgtaaaaaagggttggcttttattttggtgctcatttttgttaacgctctcattttgaatccacttaatggagcggctgcggaaaccgtacataaaggtaaatctccagctgcagataaaaacggtgtattttatgaggtgtatgtaaactctttttacgatgcaaataaagatggacatggtgatttaaaaggtcttacacaaaagctggactatttaaatgatggcaattctcatacaaagaatgatcttcaagtaaacgggatttggatgatgccggtcaacccttctcctagctatcataaatatgatgtaacggactattataacattgatcctcagtatggaaatctgcaagattttcgcaaactaatgaaagaagcagataaacgagatgtaaaagttattatggacctcgttgtgaatcatacgagcagtgaacacccttggtttcaagctgcgttaaaagataaaaacagcaagtacagagattactatatttgggctgataaagataccgacttgaatgaaaaaggatcttgggggcagcaagtatcgcataaagctccaaacggagagtatttttatggaacgttctgggaaggaatgcctgacttaaattacgataaccctgaagtaagaaaagaaatgattaacgtcggaaagttttggctaaagcaaggcgttgacggcttccgcttagatgctgccctccatatctttaaaggtcaaacacctgaaggcgctaagaaaaatctcctgtggtggaatgagtttagagatgcaatgaaaaaagaaaaccctaacgtatatctaacgggtgaagtatgggatcagccggaagtagtagctccttattatcagtcgcttgattccctatttaactttgatttagcaggaaaaattgtcagctctgtaaaagcaggaaatgatcaaggaatcgctactgcagctgcggcaacagatgaactgttcaaatcatacaatccaaataaaattgacggcattttcttaaccaatcatgaccaaaatcgcgtcatgagtgagttaagcggagatgtcaataaagcaaagtcagctgcctctatcttacttacgcttcctggaaatccgtatatttattacggtgaagaaatcggcatgaccggtgaaaagcctgatgaattaatccgtgaaccgttccgctggtacgaaggaaacggacttggacaaactagttgggaaacacctgtatacaataaaggcggcaacggcgtgtctgtagaagcacaaaccaaacaaaaggactctttgttaaatcattatcgtgaaatgattcgcgtgcgtcagcagcacgaagagttagtaaaaggaacgcttcaatctatttcagtagacagtaaagaagttgttgcttatagccgtacgtataaaggcaactccattagtgtgtatcataatatttcaaatcaacctgtaaaagtatctgtagcagcgaaaggtaaattgatttttgctagtgaaaaaggtgctaagaaagtcaagaatcagcttgtaattccggcgaatacatcggttttgataaaataa

SEQ ID NO: 362 - protein, 526 aa, Bacillus sp
MKQLCKKGLAFILVLIFVNALILNPLNGAAAETVHKGKSPAADKNGVFYEVYVNSFYDANKDGHGDLKGLTQKLDYLNDGNSHTKNDLQVNGIWMMPVNPSPSYHKYDVTDYYNIDPQYGNLQDFRKLMKEADKRDVKVIMDLVVNHTSSEHPWFQAALKDKNSKYRDYYIWADKDTDLNEKGSWGQQVSHKAPNGEYFYGTFWEGMPDLNYDNPEVRKEMINVGKFWLKQGVDGFRLDAALHIFKGQTPEGAKKNLLWWNEFRDAMKKENPNVYLTGEVWDQPEVVAPYYQSLDSLFNFDLAGKIVSSVKAGNDQGIATAAAATDELFKSYNPNKIDGIFLTNHDQNRVMSELSGDVNKAKSAASILLTLPGNPYIYYGEEIGMTGEKPDELIREPFRWYEGNGLGQTSWETPVYNKGGNGVSVEAQTKQKDSLLNHYREMIRVRQQHEELVKGTLQSISVDSKEVVAYSRTYKGNSISVYHNISNQPVKVSVAAKGKLIFASEKGAKKVKNQLVIPANTSVLIK

SEQ ID NO: 363 - DNA, 1761 bp, Anoxybacillus flavithermus
  CDS (1)..(1761): transl_table=11
atgttaaaggaagctgtataccaccgtccaaccgatcagtttgcctatgcttatgacgacaaaacattgcacattcggttgcgaacgaagaaaagcgatgttcatgctgtgtcccttttgcatggtgatccgtattgttgggaagataggcaatggcagtttacaaaaacagagatgacaaaaagcggatcagatgccttgtttgactattggtgggtcgccatatcaccgccatatcgccgtctccgctacgggtttgagcttgtgtcaggaaacgagagatgcgtttatacggaaaaagggttttttcatgaagcacctattgatgatatcgcttattatttctgcttcccatttttaaatcgaatcgacgtatttcacgcgccaacatgggtgaaagataccgtttggtatcaaattttccctgagcggttcgcaaatggggatccgtccttgaacccgaaaggaacgatcccgtggggaagtgccgatccgactccgacgagcttttttggtggtgattttgctggcattatggagcggcttgattatttagtcgagctaggaattaacgggatttatttcactccgatttttaaagcatcgtccaatcataaatacgatacaattgattatttcgagattgatccacaatttggtgacaaaccaacatttaagcgacttgtcgagcgttgccaccaaaaaggcattcgcgttatgcttgatgcggtatttaatcatagtgggcattttttcgctccatttcaagatgtgctgaaacatggagaaaaatcaaaatataaagattggttccatattcacgagtttccattacaaaccgaaccgttaccgaactacgatacatttgccttcgtgccaactatgccaaaattaaatacggaaaatcaagaagtgaaacaatatctattagatgtagcaacatattggattcgcgaatttgatattgacggttggcgtttagatgtcgcaaatgaagtcgatcatcaattttggcgcgagtttcgtcaagcagtgaaagcggtgaaacaagacgtatatattcttggggaaatttggcacgatgcaatgccttggttacgcggcgatcagtttgatgcggtgatgaattatccatttacaaatggggtattgcgttattttgctaaaagcgaaatgaaagcaagcgaatttgctcattcgattacaaacgtgctccattcgtatccaaacaacgtaaatgaagtagcattccatttacttggcagccacgacactccgcgcattttaacggaatgtggggaaaataaggaaaaagtaaaactgatgtttactttccaattttcgttcacagggactccgtgcatttattacggcgatgaaattgggctaactggcggacaagacccgctttgccgcaaatgcatggtctgggaggaagaaaaacaagacctcgagttattcgcacacgtgcaaaaattaatttcattgcgccgcaagtaccgctctttgtctcgtggcgaactacactttctagaaacgaatgacgaaacaaaccatcttgtctatactaaaacatatgaacaagaaacggtaatattccttcttaacaatagcaaccgaaagcttgacatcacattgccgctttcggtaaaaagaaaaaagcttactgatttatggacaaataagcaatttgtgtcagaagaaaacgaatggaccgtaacgcttgcgccatacggatttcttatgttcttagttgaataa

SEQ ID NO: 364 - protein, 586 aa, Anoxybacillus flavithermus
MLKEAVYHRPTDQFAYAYDDKTLHIRLRTKKSDVHAVSLLHGDPYCWEDRQWQFTKTEMTKSGSDALFDYWWVAISPPYRRLRYGFELVSGNERCVYTEKGFFHEAPIDDIAYYFCFPFLNRIDVFHAPTWVKDTVWYQIFPERFANGDPSLNPKGTIPWGSADPTPTSFFGGDFAGIMERLDYLVELGINGIYFTPIFKASSNHKYDTIDYFEIDPQFGDKPTFKRLVERCHQKGIRVMLDAVFNHSGHFFAPFQDVLKHGEKSKYKDWFHIHEFPLQTEPLPNYDTFAFVPTMPKLNTENQEVKQYLLDVATYWIREFDIDGWRLDVANEVDHQFWREFRQAVKAVKQDVYILGEIWHDAMPWLRGDQFDAVMNYPFTNGVLRYFAKSEMKASEFAHSITNVLHSYPNNVNEVAFHLLGSHDTPRILTECGENKEKVKLMFTFQFSFTGTPCIYYGDEIGLTGGQDPLCRKCMVWEEEKQDLELFAHVQKLISLRRKYRSLSRGELHFLETNDETNHLVYTKTYEQETVIFLLNNSNRKLDITLPLSVKRKKLTDLWTNKQFVSEENEWTVTLAPYGFLMFLVE

SEQ ID NO: 365 - DNA, 1749 bp, Thermoactinomyces thalpophilus
  CDS (1)..(1749): transl_table=11
atgcttattgaagcactttttcacgaaacgagggttccctatgcctgtccggaaaatttgcattccctcagggtgcgactgcgtgccgggaaaggagaaatcgcccgctgtctcgtgctccacgcggatcgctatgaattactggattcctgttttcagcagacggaagcggaatggatggcctcggaccagcggtttgattattttgaagctttgctggagtgcactgcaaaacgcctgcaatatgtatttctcctggaaggaaaaaaaggagagcgggtttatttcggagaatcgggagtgtcaaaggaacggaaccgggcaggagttttccagtatgcctatatccatgaatcagccttgtttgtgaccccggagtgggccagggatgcggtggtttatcagatttttccggacaggtttgccaatggtgacaaggagaacgacccgccccggacggaagattggagcaaggatgcacggcccggaagggacagtttttacggcggtgacttggagggggtgatccattccctcccctatttgcgcaaactgggggttaatgcgctctatttcactcccatttttgcctccccatccaatcacaagtacgatacagcggattatctgagaattgatccccagtttggcaatctggacacgtttaagcgcctgatcagggaggctcaccggcacgggatgcgaatcattcttgatgcggtgttcaaccattcgggtgaccggttttttgcttttcgcgatgtactggaaaagggagcggactcgcaatacagagactggtttttcatcgagcagtttccggttgtgcaaacgccacagcccaactatgagacgtttgctgtcaatgttcctgtcatgccgaagctgcgcacggaaaacagggaggtaaaagaatatttgttccaggtcgtccgctactggacagaaatggggatcgacgggtggcggctggatgtggccaatgaggtggatcatgccttttggcgtgatttccgatcttttgtgaagatgctgaatccggaagccctcatcatcggcgaagtatggcataatgcggtaaaatggctggaaggggatcagtttgattcggtcatgaattatttgtttcgcgactgcgtttatcgtttttttgcagagcaaacatcagatgccagcgagtttgatgccgaattgaccacagcacgcatctcttatccggatcaggcgctgcaagtggcatggaatctgcttgattcccatgataccgagcgctttttgacctcttgcggtgaaaaggaagaacggttccgcctggccgtcttgtttcagatgacctatgtggggacgccgttgatttattacggggatgaaataggcatgaccggagagacagatcctgattgccgccggccgatgttgtgggataaagaggagcaaaatcaggcgcttttctcctattatcaacggctcatccggattcgccggagttgtgctccgttgcggagggggagtttccggacatggttggctgatccaggttcccctgtctatgcctttgtgcgctcatggcaaggggaaaatgcaggaattgtcctgaataacagcgacagctggcaaaatgtttccttgccgctggatacatgggcaaaaaggaattggaccgatttgttgacgggggaaaaaggccaggcatcaggaaaccggatggagttgattctttccccttatcagggaatagtgctggtttga

SEQ ID NO: 366 - protein, 582 aa, Thermoactinomyces thalpophilus
MLIEALFHETRVPYACPENLHSLRVRLRAGKGEIARCLVLHADRYELLDSCFQQTEAEWMASDQRFDYFEALLECTAKRLQYVFLLEGKKGERVYFGESGVSKERNRAGVFQYAYIHESALFVTPEWARDAVVYQIFPDRFANGDKENDPPRTEDWSKDARPGRDSFYGGDLEGVIHSLPYLRKLGVNALYFTPIFASPSNHKYDTADYLRIDPQFGNLDTFKRLIREAHRHGMRIILDAVFNHSGDRFFAFRDVLEKGADSQYRDWFFIEQFPVVQTPQPNYETFAVNVPVMPKLRTENREVKEYLFQVVRYWTEMGIDGWRLDVANEVDHAFWRDFRSFVKMLNPEALIIGEVWHNAVKWLEGDQFDSVMNYLFRDCVYRFFAEQTSDASEFDAELTTARISYPDQALQVAWNLLDSHDTERFLTSCGEKEERFRLAVLFQMTYVGTPLIYYGDEIGMTGETDPDCRRPMLWDKEEQNQALFSYYQRLIRIRRSCAPLRRGSFRTWLADPGSPVYAFVRSWQGENAGIVLNNSDSWQNVSLPLDTWAKRNWTDLLTGEKGQASGNRMELILSPYQGIVLV

SEQ ID NO: 367 - DNA, 1332 bp, Anaerobranca gottschalkii
  CDS (1)..(1332): transl_table=11
atgcaacaagagattttatattttattatggtagatcgttttttccaagggataaaagataaggagtttgatgatatagataaaagtcatcccagaaaattccatggaggagatatcaaagggataatagaaaaattagactatatacaagagttaggagcaacagccctctggattactccgatttttaagaatgatcccgatggttatcatgggtattgggcacaagacttttttagtgtagatccccattttggaattctagaggattttaaagagttggtacaaaaagcccatagaaaagggttaaaggtgattttagatatagtagtaaatcatacaggaaaaacccatcctcttttaaaggaaaagccccattggtttcatcctttagtacctattaaagattgggataaccaaaaggaagtagaggaaaagtgtttagggatgttaccagatttgaaccaggatttaccggaagtcagtagttatctaattaatatgtgtaaatggtggattgttcaaacaggtttagatggctttagaatagatacagtaaaacatgttcctagggaattttggagaaagttttgccaggaaatgaaaggggtaaaggaagatatcattcttttaggagaagtatggcatccagatccctgttacttagctccttatcaaaaggatggaattaactctttagtggattttcctctatattatgctattactaaagtatttgctaaagatgaacctatggataaaatttcatcaatattattgcaagatcacctttatcaaaacccttatcttctaggtacatttattgacaatcacgatgtaccaaggtttttaagtgtcgtaaaggatcggggaaaagaacgtttaaaattagcccttgattttctattctcagtaaggggagtaccgataatatattatgggacagaaactggtatggatggaggggatgatccccataatcgaaaggatatggattttgaaggggatcttgaattaagaaaatatgttaaagacctaattaccctaagaaaaaaatatttatctttatctttaggttctctgaaagttttaaaggtaaccgatgatggtatggtctttattcgggaatgtggagaagagcaagttgttatctttattaataacagttttgatagtcaaacttttgtagtaagacttcccgatgaattacaaaggaaaagctggaagttagtatggggtaaagggacctaccaatattcctatgaaatagcatcttgtataataccacctaaatcttctgcctattttcaattatttgcccctgaaaaataa

SEQ ID NO: 368 - protein, 443 aa, Anaerobranca gottschalkii
MQQEILYFIMVDRFFQGIKDKEFDDIDKSHPRKFHGGDIKGIIEKLDYIQELGATALWITPIFKNDPDGYHGYWAQDFFSVDPHFGILEDFKELVQKAHRKGLKVILDIVVNHTGKTHPLLKEKPHWFHPLVPIKDWDNQKEVEEKCLGMLPDLNQDLPEVSSYLINMCKWWIVQTGLDGFRIDTVKHVPREFWRKFCQEMKGVKEDIILLGEVWHPDPCYLAPYQKDGINSLVDFPLYYAITKVFAKDEPMDKISSILLQDHLYQNPYLLGTFIDNHDVPRFLSVVKDRGKERLKLALDFLFSVRGVPIIYYGTETGMDGGDDPHNRKDMDFEGDLELRKYVKDLITLRKKYLSLSLGSLKVLKVTDDGMVFIRECGEEQVVIFINNSFDSQTFVVRLPDELQRKSWKLVWGKGTYQYSYEIASCIIPPKSSAYFQLFAPEK

SEQ ID NO: 369 - DNA, 1740 bp, Aedes albopictus
  CDS (1)..(1740)
atgaagatcttcatacctctattaaccaccctcctagtagggctgaccactgctctagactggtgggagcacggaaacttctaccaggtctacccacgatccttcaaggattccgatggtgacggaattggtgatctggatggaatcaccgaaaagctgcaatatctaaaggacatcggcatggacggagtttggttgtcaccgatcttctcttcaccgatggctgattttggctacgacatttcaaacttccgtcagattcagaccgaatacggagatctggatgctttccagcgcttgtccgacaagtgtaaggaactgggcttgcatctgatcttggatttcgtcccgaaccatactagcgatcagcacgaatacttcattaagtctgtggaaaaagacgagacctacaaggatttctacgtctggcacccaggtgtagatggaccaaacaacaccaaggttccgccatcgaactggatcagcgtgttccgtggatcttcctgggaatggaatgagcagcgcggggagttttacctgcatcaatttttgaaggagcaaccggatcttaactatcgcaatcctgccgtagttgaagagatgaagaacgtgctgcggtattggttggatcgtggagtttctgggttcagaattgatgccgtgccgtatctgtttgaaagtggcgagtccgacggacgttatcgcaatgaaccagagagtcgagccaccgacgatcccgagaatccagcttacctgacccatacgcaaaccatggatcagccggaaacctacgacatgatctatcaatggcgcgcagttttggacgaatattcccagaaagacaacagaactcgtatcatgatgaccgagggctacacgagccttccgaagatcatcgagttcttcggtaacgctaccgcaaacggggcacagattccgttcaacttcgaagtgatcagtaacatcaagaagaccagcactggcgctgactttgccaaatacgtcaaaaactggctggatgccaaaccagcgaacagacgttccaactgggtgcttggaaatcacgacaaccctcgtattggatctcgtcttggtgagaacaagatcgacttgtacaacattgctctgcaaacgttgccggatattgccgtcacgtactacggcgaggaaatcggaatgctcgatcagtggattccttggaatgagaccgttgatccggctgcctgtagatcggacgaagccacctataccgcttactctcgagatccagttcgtaccccaatgcagtgggacaatgaaaagaacgccggtttctctacagcagctaaaacatggcttcaggttgcggataactataagaccctcaacgtcaaggttcaggaccgcgcccgcaagagtcatctgaagatattcaagaagctgaccaaataccgaaagcgccaaattctgaccgaaggagacctggacatccaggtgtccggggagaatctactcgtgtacaaacggaaggtcgacaaggtgggctacgtggttgtggcgctaaactttggcacggaaccggttgcgctgggtctgaccagtttgtacgatggagttgataaacgaatgcaagtggtggtatcttctaacagagtgaccactgctgataacgcctgggtggatgcggacaaataccgattgattggagagagcggtatcgttcttcaatacctttggggtaagaatccaattgtttcctaa

SEQ ID NO: 370 - protein, 579 aa, Aedes albopictus
MKIFIPLLTTLLVGLTTALDWWEHGNFYQVYPRSFKDSDGDGIGDLDGITEKLQYLKDIGMDGVWLSPIFSSPMADFGYDISNFRQIQTEYGDLDAFQRLSDKCKELGLHLILDFVPNHTSDQHEYFIKSVEKDETYKDFYVWHPGVDGPNNTKVPPSNWISVFRGSSWEWNEQRGEFYLHQFLKEQPDLNYRNPAVVEEMKNVLRYWLDRGVSGFRIDAVPYLFESGESDGRYRNEPESRATDDPENPAYLTHTQTMDQPETYDMIYQWRAVLDEYSQKDNRTRIMMTEGYTSLPKIIEFFGNATANGAQIPFNFEVISNIKKTSTGADFAKYVKNWLDAKPANRRSNWVLGNHDNPRIGSRLGENKIDLYNIALQTLPDIAVTYYGEEIGMLDQWIPWNETVDPAACRSDEATYTAYSRDPVRTPMQWDNEKNAGFSTAAKTWLQVADNYKTLNVKVQDRARKSHLKIFKKLTKYRKRQILTEGDLDIQVSGENLLVYKRKVDKVGYVVVALNFGTEPVALGLTSLYDGVDKRMQVVVSSNRVTTADNAWVDADKYRLIGESGIVLQYLWGKNPIVS

SEQ ID NO: 371 - DNA, 1170 bp, Aeromonas hydrophila
  CDS (1)..(1170): transl_table=11
  misc_feature (866)..(866): n is a, g, c or t
atgcgcatctgggcaccaacgcccaattcggccgagctgacgcgcaacctgcaccagcgcggcatgaagatcatcctggatgcggtggtcaaccacacctccaccgaacacccctggttctgcccgccgctgggggcccagcgcaacccggactcgccgtggcgcagcttctacacctttgacaacgaaggggattacgtcagctggaagggcatccgcagcctgcccaagctcgacttctccagcgaacaggtgcaggacgccgtctatcgcgccgatgacgccatcctgcgctactggatgcgcgccccctaccagatcgacggctggcgcttcgacgtcatccacatgctgggggagcgcggcaccgccgagggcaaccgcggccacgtgcgcgccattcgcggcgcggtgaagcaggagaacccggacgcctatgtactgggcgagcacttcttcgaggcgagccagtggttgcagggggatcaggaggatggcgccatgaactactacggcttcgcccacccgatccgcgccttcctggcgggccaggacatcgcctaccaccccatcaagatcagcgccgaggagctggatcgctggctcaagctggcgcgggcccacatcccgttcaagaatcagctggcacagttcaacctgctggacagccacgacaccgcccgcttcctccatctgctgggggaggacaagcagcggatgcggctcgccgccaccctgctgctcacctacatcggcgtaccctccatctactacggcgatgaagtggggctctctggcggcaacgatccggactgccgccgctgcttcccgtgggagaccaccgcctgggatcacgttctgcacgnccactaccgccggttgatccagatccgccggcaacgtccggctctgcgccgcggcgacatccagaccctctatgccggcccgcacagctatgtgttcgcccgcaccctgcaaagcgatcaggtggtggtagcctgcaaccgtcaccccagcgagccgcgcaccatcagtctgcccctgtggcagaccgccagtcccgccagccgcttcacagacgccttgaacggcgacaagttcgaagtagtgcagggcgagatacagctcaccatccccgccaactcggccagagtgctgctctccagctag

SEQ ID NO: 372 - protein, 389 aa, Aeromonas hydrophila
  misc_feature (289)..(289): The Xaa at location 289 stands for Ala, Asp, Gly, or Val.
MRIWAPTPNSAELTRNLHQRGMKIILDAVVNHTSTEHPWFCPPLGAQRNPDSPWRSFYTFDNEGDYVSWKGIRSLPKLDFSSEQVQDAVYRADDAILRYWMRAPYQIDGWRFDVIHMLGERGTAEGNRGHVRAIRGAVKQENPDAYVLGEHFFEASQWLQGDQEDGAMNYYGFAHPIRAFLAGQDIAYHPIKISAEELDRWLKLARAHIPFKNQLAQFNLLDSHDTARFLHLLGEDKQRMRLAATLLLTYIGVPSIYYGDEVGLSGGNDPDCRRCFPWETTAWDHVLHXHYRRLIQIRRQRPALRRGDIQTLYAGPHSYVFARTLQSDQVVVACNRHPSEPRTISLPLWQTASPASRFTDALNGDKFEVVQGEIQLTIPANSARVLLSS

SEQ ID NO: 373 - DNA, 1449 bp, Thermoactinomyces vulgaris
  CDS (1)..(1449): transl_table=11
atgaaaaagggagctttgctcagtgggttggtgtgtttattgtcggctgtgctgatgtttgcttctaccgcacccacagccgtggcgctttctcctgcggattggcaagagaaaagcatctattttattatgaccgaccggtttgacaatggtgaccccagcaatgacaattatggcggttttaacgctgacaaaagcgatccgcgcaagtatcatggtggggattttcaagggattatcaatcgcttggactacatcaagaatatggggttcacggccatttggattactcccgtcacgatgcaaaagagcgctaatgcatatcatggttattggacctatgatttttacagcgtagacggtcatctgggctccatggctaagctgcaagaattggtgcgggcggcgcatgcgaaagggatatcggtgatgctggatgtagtcgccaatcatacaggggatttccaaccttcgagcttcgccaaagctccgtttgacaaggcagattggtaccatcattatggcgacactcaagactggaacgatcaatggtgggtggagaatggagatattgccggcttggatgatttaaaccaagataatccggcagtggcaacggaattgaagaattggatcgcatggcttgtgcaaacgaccggagtggatgggttgcgcgttgatacggtgaaacacgttccaaagtggttctggcgcgaatttgacggggcagccaatacctttacccttggcgaagtgtttcatggggaccccgcatatgtaggcgattacaccaattatttggatgcggtgctcgatttcccgatgtactacaccatcaaaaatgtgtttggccaagaccagtcgatgagaacgattgcggatcgttacgcgcaagactatcgatataaaaatccgatgactaacggcttgtttatagacaaccatgacgtgccgcgctttttgaatgaagcttcaggcaagcctggcgcttcctgggacaagtggccgcaattaaaagcagcattgggcttcatgtttactacccgtgggatcccgattctgtatcaaggcacagagcagggatttagcgggggcgctgatccttacaaccgggatgatatggtctttaacgacaagcatgagctctacggttatatcgccaagctaaattatattcgtaacactcatgttgctttgcgcaaaggaacacaggctgaaaagtgggtggatgacacattttacgcttttcagcgttcgtataacggcgatgaggtggtggtgatgatcaataattcttggaacagccagacgcgcacagtgcccaacatcgatcgagtcgccaatgggcaaaccctgtacaatcggatggggacggacaaagtaacagtgaacaatggttcgattactgccacactcggccccaaagaagtaaagatatttaccaaatga

SEQ ID NO: 374 - protein, 482 aa, Thermoactinomyces vulgaris
MKKGALLSGLVCLLSAVLMFASTAPTAVALSPADWQEKSIYFIMTDRFDNGDPSNDNYGGFNADKSDPRKYHGGDFQGIINRLDYIKNMGFTAIWITPVTMQKSANAYHGYWTYDFYSVDGHLGSMAKLQELVRAAHAKGISVMLDVVANHTGDFQPSSFAKAPFDKADWYHHYGDTQDWNDQWWVENGDIAGLDDLNQDNPAVATELKNWIAWLVQTTGVDGLRVDTVKHVPKWFWREFDGAANTFTLGEVFHGDPAYVGDYTNYLDAVLDFPMYYTIKNVFGQDQSMRTIADRYAQDYRYKNPMTNGLFIDNHDVPRFLNEASGKPGASWDKWPQLKAALGFMFTTRGIPILYQGTEQGFSGGADPYNRDDMVFNDKHELYGYIAKLNYIRNTHVALRKGTQAEKWVDDTFYAFQRSYNGDEVVVMINNSWNSQTRTVPNIDRVANGQTLYNRMGTDKVTVNNGSITATLGPKEVKIFTK

SEQ ID NO: 375 - DNA, 1581 bp, Xanthomonas campestris
  CDS (1)..(1581): transl_table=11
atgtcttcgtcctgccgtttccgcccgttgtcgttcctgctcgccgccgcgctcggcgcatccgcggcgttcgcgccgtccgtgcatgccgccgatgccgcgcctgccactccgcggtccgaaggctccggcgtgtggtacgagatcttcgtgcgcgcctggtacgacaccgacggtgacggcatcggcgatctcaacggcgtcaccgccaagctcgactacctgcaatcgctcggcgtcagcggcatctggctgatgccgatcaatccgtcgcccagctaccacggctacgacatcaccgactacgaggggatcaacccgcagtacggcacgatggccgacttcgagaagctggtgagcgaagcgcacaagcgcggcatcgaggtgatcctcgacctggtgatcaaccacaccagcgaccagcatccatggttcaaggcggcgctggatccgaaggacgcgcatcgttcctggtacacctgggcaggcccgggtacgaacctgaaggcggtcagcgcggtgggcggcccggcgtggcatgccaacggcaagcagcactacctgggcgatttcaccggcgccatgccggacctcaactacgacgagccagcggtgcgccgcgagatgatcgcggtcggcaagttctggctggacaagggcgccgatggcttccgcctggatgccgcgcgccacatctatgacgatctggaaagcgacaacggccagcccgccgtgatcgccaggaatgcccagtggtggaacgagttccgccagggtttgcggcaggtccgtccggacgtctatctggtcggcgaggtctcggccaagcagccgggcgagctggcgccgtatctgccggcactgggctcggtgttcgactttccgctggccgagcagctgatcgccagcgccgggcaggaaaaggccggcaagctgccggcgctgctcaccgaaacgtacgcggccttccgtgccgccgcgggcgacgactacgccgacgcgccgttcctttccaaccacgatcaggagcgtgtgctcagccagctcggcggcgatctgcgccacatgcgcacggcggcggcgatgctgctgaccttgcccggccggccgtacctctactacggcgaagagatcggcatgctcggccgcaagccggacgagaacctgcgcgaacccatgcgctggcagcgccaggccggcgcgccgggcgacagccgctggaagccgtacagcgtgaagcagggcggcgaagtgtcggtgcaggccgagcaggatcggcccgattcgctcctgagcttctaccggacgctgatccattggcgcgtggaggtgccggcgctgcgcgacggcgcgctgcgcgtggtcgataccggcgccccggcgctggtggcctacgagcgcgtcacggcggacagccgcgcgctggtggtgcacaacctctcgggcaagccggcgagcatgaagctcggcgccgaccgcgccaaggccttcgccgccatccgcctgcacagtgcgcctggcgcgacgctgacggagggccggctcaccgtgccggcgtacgccaccgtggtgttgcagtga

SEQ ID NO: 376 - protein, 526 aa, Xanthomonas campestris
MSSSCRFRPLSFLLAAALGASAAFAPSVHAADAAPATPRSEGSGVWYEIFVRAWYDTDGDGIGDLNGVTAKLDYLQSLGVSGIWLMPINPSPSYHGYDITDYEGINPQYGTMADFEKLVSEAHKRGIEVILDLVINHTSDQHPWFKAALDPKDAHRSWYTWAGPGTNLKAVSAVGGPAWHANGKQHYLGDFTGAMPDLNYDEPAVRREMIAVGKFWLDKGADGFRLDAARHIYDDLESDNGQPAVIARNAQWWNEFRQGLRQVRPDVYLVGEVSAKQPGELAPYLPALGSVFDFPLAEQLIASAGQEKAGKLPALLTETYAAFRAAAGDDYADAPFLSNHDQERVLSQLGGDLRHMRTAAAMLLTLPGRPYLYYGEEIGMLGRKPDENLREPMRWQRQAGAPGDSRWKPYSVKQGGEVSVQAEQDRPDSLLSFYRTLIHWRVEVPALRDGALRVVDTGAPALVAYERVTADSRALVVHNLSGKPASMKLGADRAKAFAAIRLHSAPGATLTEGRLTVPAYATVVLQ

SEQ ID NO: 377 - DNA, 3309 bp, Rhodobacter sphaeroides f
  CDS (1)..(3309): transl_table=11
atgaatcagaatgtctctccctccaccgttgccgtccgccgcacggacggcatcgatcgcagccagaccgactggtacaaggatgcgatcatctaccagttgcacatcaaggcgttccaggacgccaatggcgacgggatcggtgacttcgcgggcctgatgcagcggctggattatgtgcaggcgctgggcgtgaccgcgatctggctgctgccgttctacccttcgccgctccgcgacgacggctacgacatctcggattaccgctcgatcaacccgtcctacggcgcgatgcgcgacttcaagctgttcgtgcaggaagcgcacaagcgcgggctgcgcgtcatcaccgagcttgtcatcaaccatacctccgaccagcacccctggttccagcgggcccggcgggcgaagaagggctcggccgcccgcgactggtatgtctggagcgacaccgaccagaaattccccgaaacgcggatcatctttctcgatacggaaaagtcgaactggacctgggatccggtggcgggcgcctattactggcaccgcttctattcgcaccagcccgacctgaacttcgacaatccccgcgtgctcgaggaagtcctcaagatcatgcgcatgtggctcgagatgggcgtcgacgggctcaggctcgacgcgatcccctatctggtcgagcgcgagggcaccaacaacgagaacctccccgagacgcatgacgtgctcaagaagatccgggccaatctcgaccagcatttccccgacaggatgctgcttgccgaggcgaaccaatggccggaggacacgcgcccctatttcggcgagggcgacgaatgccacatgggctttcatttcccgctgatgccgcggatgtacatggcgctcgcgcaggccgaccggcatccgatcaccgacatcatccgccagacgcccgagatcccggaaggctgccaatggggcatcttcctgcggaaccacgacgagctgacgctcgagatggtgacggccgaggagcgcgactacatgtggcgcttctatgccgaggattcgcgggcgcggatcaatctcggcatccggcgcaggctggcgccgctgatgaagaacgaccggcgcaagatcgagcttctgaaccagatgctgatgtcgatgccgggcacgcccatcgtctattacggcgacgagatcggcatgggcgacaattactatctcggcgaccgcgacggggtgcgcacgcccatgcaatggtcggccgaccgcaacggcggcttctcgcgctgcaatccgcagcagctttacctgccgaccatcctcgacccggtctacggccatcaggcgatcaacgtcgaggcgcaggcggcagacccgtcctcgctcctgaactggacgcggcggctgatcgcggtgcgcaagcagcatccggccttcgggcgcggctcgatgagcctgctctatccgcgcaaccgcaaggtgctggcctatgtgcgcagccatgagggcacggacatcctctgcgtggcgaacctctcggacacggcgcaggcggtcgagctcgatctcgcgcggttccgcggcgcggtgccggtcgagctcacgggccggtcggagtttccgccggtgggcgatctgccctacatgctgacgctgccgccctacggcttctactggttcatcctgtccgaccagcaggcgctgccgagctggcaccagccgatgcccgagacgctgccggatttcatcacgctcacgacgcgcgacgggcgggcggaaacggcgctcaccgggcgcgagacgcgccagttcgaggccgatgtgctgccgaactggctgccgctgcaacgctggttcggggccaaggaagagaagatcagcgcggtgaagctggccgttctgggctcgctctccgccgatcatgccctcgtccggctcgatgccgatgtgggcggcgaggcgcagcagtatttcctgcccgcctccgcgctctggggcgaggagcagctccgggccggggcgcccaagctgagcttcaccctggccaaggtccggcgcggcccgcaggtgggcgcgctcatcgacggggcctatgacgagcagatggcgcaggcgatgctcgaggcgctgcgtgagggccgcaggctctctggtgccgggggcgaggtggtgttcgagccgggctcgggactggccgagatcgccgacccgggcgagccgcgctatctcggggccgagcagtcgaacatttccatcgccttcggcgaccgcctgatcctgaagctctaccgacgcctgcgggccggcgagcagccggacgtcgaggtggcgcgcttcctgacggaagtggcgggctacacccatacgccccgctatctcggcgtcgtgagcctgcgcccggcggagggcgaggcgaccgtcctcgccgcggccttcgccttcgtggccaacatgggcgacgcctggcgcggcctcttcgacgcgctggtgcgggatctgggcgagttcggcggctggagcacggccgaggcgccggaagtggagaaggaaggcttctccttcccgctcaccatcccgggccttctcggccagcgcacggccgagctgcatcaggctttcgccaccgagaccgacgaggcggccttccgcatggagccgctgagggccgagcatctgacgggctgggccgagggggcgcggcgcgaggccgagaccatgctgtcggtgctcgaacggcagcggacgcatctgcccgaggaggtgctgcctctggccgaggcgctgctggcgcggcgcgacgacctgctggcgcggctcgaccgcgttaccggcttcgaaccctcgggcgcgctgacccgcattcatggcgactaccatctgggtcaggtgctgcttgcgcaggacgatgtcgccatcatcgactttgagggcgagccgcgccgcacgctcgaggaacggcgcgagaaatcctcgccgctccgcgatgtggcggggatgctgcgctcgttcgactatgccgccgccgcagccctcgcccgtcacgaggaaagcttcggcccggccagcgagcgggcggtggagcgggccgaagcctggcggcagcaggcggtggccgacttcctctctgcctacgagggcgcgtccgccggaaccgcgagcctgccctcggacccggcgctgaaggaggcgctgctcgatctcttcctcgtgcagaaggcggtctacgagacctcctacgaattgggcagccgtcccgcctgggtcggcatcccgctgcgcggccttctggaactgttggacaggacacctgcatga

SEQ ID NO: 378 - protein, 1102 aa, Rhodobacter sphaeroides f
MNQNVSPSTVAVRRTDGIDRSQTDWYKDAIIYQLHIKAFQDANGDGIGDFAGLMQRLDYVQALGVTAIWLLPFYPSPLRDDGYDISDYRSINPSYGAMRDFKLFVQEAHKRGLRVITELVINHTSDQHPWFQRARRAKKGSAARDWYVWSDTDQKFPETRIIFLDTEKSNWTWDPVAGAYYWHRFYSHQPDLNFDNPRVLEEVLKIMRMWLEMGVDGLRLDAIPYLVEREGTNNENLPETHDVLKKIRANLDQHFPDRMLLAEANQWPEDTRPYFGEGDECHMGFHFPLMPRMYMALAQADRHPITDIIRQTPEIPEGCQWGIFLRNHDELTLEMVTAEERDYMWRFYAEDSRARINLGIRRRLAPLMKNDRRKIELLNQMLMSMPGTPIVYYGDEIGMGDNYYLGDRDGVRTPMQWSADRNGGFSRCNPQQLYLPTILDPVYGHQAINVEAQAADPSSLLNWTRRLIAVRKQHPAFGRGSMSLLYPRNRKVLAYVRSHEGTDILCVANLSDTAQAVELDLARFRGAVPVELTGRSEFPPVGDLPYMLTLPPYGFYWFILSDQQALPSWHQPMPETLPDFITLTTRDGRAETALTGRETRQFEADVLPNWLPLQRWFGAKEEKISAVKLAVLGSLSADHALVRLDADVGGEAQQYFLPASALWGEEQLRAGAPKLSFTLAKVRRGPQVGALIDGAYDEQMAQAMLEALREGRRLSGAGGEVVFEPGSGLAEIADPGEPRYLGAEQSNISIAFGDRLILKLYRRLRAGEQPDVEVARFLTEVAGYTHTPRYLGVVSLRPAEGEATVLAAAFAFVANMGDAWRGLFDALVRDLGEFGGWSTAEAPEVEKEGFSFPLTIPGLLGQRTAELHQAFATETDEAAFRMEPLRAEHLTGWAEGARREAETMLSVLERQRTHLPEEVLPLAEALLARRDDLLARLDRVTGFEPSGALTRIHGDYHLGQVLLAQDDVAIIDFEGEPRRTLEERREKSSPLRDVAGMLRSFDYAAAAALARHEESFGPASERAVERAEAWRQQAVADFLSAYEGASAGTASLPSDPALKEALLDLFLVQKAVYETSYELGSRPAWVGIPLRGLLELLDRTPA

SEQ ID NO: 379 - DNA, 1548 bp, Ostreococcus tauri
  CDS (1)..(1548)
atggaagctgcgctcgcgtctcgcgaacgcgcgcgcgcgaagatcgtgcggaagaatcaaaacgacgagtcttccatgaaaagggcacagggtgatgcggtctctacgctagcaaagtcgaggctgcccttggatgagaggaacaccgtcgccgccccaaagctgaaaaagattaccgagatggccccgcaaacaccctttgcatcgcctctgagccgcccgctaccgtctacgccgtgcggaaatggtcgtgaattaattcttcaaggatttaattgggagtcgtgccaacacgcagaaaaaatgggcgcgtcttggtacgcgcacctgactgagatgacccctcaaatcgccgaagccggtttcacatccgtgtggttgccgccgccgacgaaatctgtgagtaaacaaggatatctaccgacggatttgtacaatctgaactcattctatgggtctgaagatgagctgaggtcttgtgtcgcgcgcctgcgtgagtacaacatcaccccagtggcggacattgtcatcaatcatagatgcgccgaggcaaaggatgacgccggtcggtggaacaagtacaccgggaagctagattgggatgagcgcgcgatcacgtgtgagaaccccgcctttggcggccgcggggcacataagactggcgaggattatctccccgcgccgaatatcgatcacacgcaagagtttgttcgacgcgatttgacccagtggctcgaatggttgcgtagcgacgtcggtttccgcggttggaggtttgacttcgtcaagggttacagtggcgccttcacgggagagtacgtcgaagctacgcgaccgtttttggcctttggcgagttctgggacgagtgtggatacagggatggagtcttggattataaccaagacgctcaccgccagcgcacgtgcaactgggtcgactccacgaccggtaacaccgccgcgttcgacttcacgacgaagggaattttgcaagaagccgtctcacgcaccgagtactggcgattgatcgacaacaaaggtcgtccaccgggattcttaggcatctggccttctcgcgccgtgaccttcatagaaaatcacgacactgggtctacgctccagcactggcctttcccatgggacaaggtcctgcaaggttactgctacatcttgacgcatcctggaacgcctacggtgttctttgatcactgggtcgatccagttttcaagccatccattgacgcgatgcttgaagttcgtaagcgcaaccgtctctcgtccaaggacgcggcgattcacattgagcgcgccaccgcgggagtctacgccgcacacgtaggccacgcgaaggaggcatacaccgaagggctgtgtaccgatgtcgacgtcacgcagccatcgatttgcatgaagatcgggcatgaagcctggtcgccgaacgcgcaaaaagttggaaacctatcttggcagtgcaccgctagcggcgacggctgggcggtctgggaagataaggcccatctcgtcgatgccgagaagatgaccagatag

SEQ ID NO: 380 - protein, 515 aa, Ostreococcus tauri
MEAALASRERARAKIVRKNQNDESSMKRAQGDAVSTLAKSRLPLDERNTVAAPKLKKITEMAPQTPFASPLSRPLPSTPCGNGRELILQGFNWESCQHAEKMGASWYAHLTEMTPQIAEAGFTSVWLPPPTKSVSKQGYLPTDLYNLNSFYGSEDELRSCVARLREYNITPVADIVINHRCAEAKDDAGRWNKYTGKLDWDERAITCENPAFGGRGAHKTGEDYLPAPNIDHTQEFVRRDLTQWLEWLRSDVGFRGWRFDFVKGYSGAFTGEYVEATRPFLAFGEFWDECGYRDGVLDYNQDAHRQRTCNWVDSTTGNTAAFDFTTKGILQEAVSRTEYWRLIDNKGRPPGFLGIWPSRAVTFIENHDTGSTLQHWPFPWDKVLQGYCYILTHPGTPTVFFDHWVDPVFKPSIDAMLEVRKRNRLSSKDAAIHIERATAGVYAAHVGHAKEAYTEGLCTDVDVTQPSICMKIGHEAWSPNAQKVGNLSWQCTASGDGWAVWEDKAHLVDAEKMTR

SEQ ID NO: 381 - DNA, 1554 bp, Unknown
  uncultured bacterium
  CDS (1)..(1554)
atgaaaaaatccatcctaactacctccatttttgcacttgtcgctttttcttcctgcgaaaaaaagcctgctccggaagtcaaaaactattggcctcaagcaggagtgacctatgagatttttgttcaatctttttatgattctaacggagacagtattggggattttaatggggtcactcaaaaactggactatgtgaaggagttgggggccaatgccatttggtttatgccgattatgccttcgccaacttaccataagtacgatgtgacggactacaaggcggttcatccagattacggtacgctggatgatttcaaaaagcttttggacgaagctcacaagcgggacatcaagattgtgatcgatttgatcatcaatcacaccagcaacgaacatccgtggtttttggaagcaaaatccggtagggataatccctatcgcgattactacgtgtgggcgcaaaaggacaccattgctgattttttgaacaaaaagaccatcacgtttgatttggataatatccgtcaatggcatgacccgggacagggagaagatttttactacgggtttttctggggtggaatgcctgatctgaactttgacaatcctaaggtaagagaggaaatctatgaaatcggacgattctggttggaagaagtgggtgtggacggatttcggttggacgctgccaagcatatttttcccgatgaccgacctttggataatcatgccttttggaaagaattccgggcaaaaatggaagtcataaagccggatgtttacttggtaggagaggtgtatgacaaaaaagaagtcgtggctccttatcttcctgggttgccagccttgttcaactttgattttcattacactctgcttgagaccatgaataccggggacgggatgcttttggccaagaagcagaaggagattttggacttttatcagggaatcacatcaagctttatcgatgcgaccatttcttctaaccatgatcagccccgtctgctgaatgaattgggatctgatccggccaaatacaagcaggccatcgcagtgatgctcagcatgccgggagcgccatatttgtattatggggaagagatcgggatgctgggtctcaagccggacgagcatatccgggagcctttcctttgggatgaaaaaagcaaggatacaggtcgcaccaagtggatcaaacccaaatacagcaaagactcaacagtaacctcattggaggtccaaaagaaagattccaacagctatttcaatcattacaaaaacttaattgctcttcgtaattcttatcctgctttggctattggttctttggaacttccagctgaggaattacctaaaagtgtaatggcatatttcagaaagtctggagatcaggaaatctttgtggttcacaatgtggacaaggaggaagttgacattcagcttccagagggatttgaagaagttattttctatttgggtgaggggaaaaacagttcaggaaaacttcagctaaaaggcaactcgagtatggtttttttgaaggattag

SEQ ID NO: 382 - protein, 517 aa, Unknown
  uncultured bacterium
MKKSILTTSIFALVAFSSCEKKPAPEVKNYWPQAGVTYEIFVQSFYDSNGDSIGDFNGVTQKLDYVKELGANAIWFMPIMPSPTYHKYDVTDYKAVHPDYGTLDDFKKLLDEAHKRDIKIVIDLIINHTSNEHPWFLEAKSGRDNPYRDYYVWAQKDTIADFLNKKTITFDLDNIRQWHDPGQGEDFYYGFFWGGMPDLNFDNPKVREEIYEIGRFWLEEVGVDGFRLDAAKHIFPDDRPLDNHAFWKEFRAKMEVIKPDVYLVGEVYDKKEVVAPYLPGLPALFNFDFHYTLLETMNTGDGMLLAKKQKEILDFYQGITSSFIDATISSNHDQPRLLNELGSDPAKYKQAIAVMLSMPGAPYLYYGEEIGMLGLKPDEHIREPFLWDEKSKDTGRTKWIKPKYSKDSTVTSLEVQKKDSNSYFNHYKNLIALRNSYPALAIGSLELPAEELPKSVMAYFRKSGDQEIFVVHNVDKEEVDIQLPEGFEEVIFYLGEGKNSSGKLQLKGNSSMVFLKD

SEQ ID NO: 383 - DNA, 2628 bp, Chlamydomonas reinhardtii
  CDS (1)..(2628)
atgcttctgcaagcccctggcctcgcgccgggctcggctcgtcgccaggcagcctgcagcgtggctcgcgaggcaaccaacgtgcgcattgtgacagcacctgctttgacacccgggcgcgctggagtttctggccggcgtatcctcccgccctcgcgcgtcgtgtccgtggagctggaggccccgacgctgtcgtcgagccctgcgactgtcagcaccaagaagttgttctgcgagccgagcgggcagcccgcatctactgcctatgggcccgccctgaccgggcgcccagctcctttgggcgccagcatcgacgctgacacgggcgccatcaacttctcagtgttcagctcctccgccgagtccgtgagcctggtgctgttcacggaggctgacctcaacgcaggccgggccactttcgagattcctctggacccgtatgtgaaccgcacgggcgacgtgtggcacatcatgctgcccgacctgcgggacgacctgctgtacggctaccgtgtggagggcgtgcaccaggaggaggacaaggactacccgggcatgaggcacgacaagcggcgtgtggttctggacccgtacgcggtggctgtgctcaaccggcggcgctggggccagatggggcccaacctgccgtacggcgaggagggcgtgctgggcgtcatgcccacgtggccgcaggccgccgccgcgctgcccgccgcccgcggctccgccttcgactgggagggcgacacgccgctcaacctgcccatggagagcctggtcatctacgaggcgcacgtgaggggcttcacggcgcacgccagcagcggggtggcggcgccgggcacgtacgcgggcatggtggagcggctggactacctcaagtcgctgggtgtgaacgccattgagctgctgcccgtgttcgagttcaacgagctcgagtactacagccagatccccggaagcgaccagtacaggttcaacttctggggctactccacggtcaactacttcagccccatgggccgcttcagcgctgcggtgggccagggcgcgccggcccgcgcctcctgcgacgagttcaagcagctggtcaaggagtgccacaggcgcggcatcgaggtgatcctggacgtggtgttcaaccatacggccgagggcaacgagcgcggccccaccatctccttccgcggcctggacaaccgcgtctactacatgctggcgccgggaggcgagtactacaactacagcggctgcggcaacacgctcaactgcaaccagcctgtggtgcggcagttcatcctggattgcctcaagcactgggtcaccgagtaccacgtggacgggttcaggttcgacctggcctccatcctgacccgcgcccactcggcctggcacccgcagcagtacgaccaggagacggggcagcgcgtggccatgagcagcggcggagccatcgtcacagcggagggcatcatgactgacggtgcgggtgtgcccaccggctacccgctggccgacccgcctctggtggagtccatcagcgaggaccccgtgctgcggaacaccaagatgatcgcggaggcctgggactgcgacggactcaaccaggtcggcgccttcccgcactacggcggccgctggagcgagtggaacggcaagttccgcgacgtggttcgcaacttcatcaagggcacggacggcccctgggcgggcgacttcgcctccgccatctgcggctcgcccaacatctacgccaacaacacgccgcacgagaccgactggtgggccaacaacggcgggcggcagtggaagggcggccgcggcccgcacgcctccatcaacttcgtggcggcgcatgacggcttcacgctggcagacatggtggcctacaacaacaagcacaacgaggccaacggagagaacaaccgggacggcgagcaacacaacaacagctggaactgcggcgaggaggggcccaccaccaagtgggaggtcaaccggctgcgtcagcgccagatgcgcaacctgaccggcgcgctgctgctgtcgtgcggcgtgcccatgatcaacatgggcgacgagtacgggcacagcaagaacggcaacaacaacacctactgccacgacagcgagctaaactacctgcggtgggaccagctggccgaggacccgcacggcttcaaccgcttcgtgcgcctgctgatccacttccgccgcgccacgcccgcgctgcagcgcaccacctttgtcaacgacaaggacatccagtggcacggcgagctgcccaacacgcccgactggaccgacaccagccgcctggtggccttcacgctgcacgacggcaagggcggcggcctgtacgtggccttcaacaccagccacctgcccaagctgctgcagctgcccaagtggggcggccgcgtgtggcagccgctggtggacaccagcaaggtggccccctacgacttcctggcggtggacggcgttctgagcgccgaggacgtggcggcggcgcggcggcagatggccatgtggaccgccgaccacacctaccccgtgctgccctggagctgcatcgtgctgcagagcgcgcccgaggacccggccgccacaagcatgatcaagtga

SEQ ID NO: 384 - protein, 875 aa, Chlamydomonas reinhardtii
MLLQAPGLAPGSARRQAACSVAREATNVRIVTAPALTPGRAGVSGRRILPPSRVVSVELEAPTLSSSPATVSTKKLFCEPSGQPASTAYGPALTGRPAPLGASIDADTGAINFSVFSSSAESVSLVLFTEADLNAGRATFEIPLDPYVNRTGDVWHIMLPDLRDDLLYGYRVEGVHQEEDKDYPGMRHDKRRVVLDPYAVAVLNRRRWGQMGPNLPYGEEGVLGVMPTWPQAAAALPAARGSAFDWEGDTPLNLPMESLVIYEAHVRGFTAHASSGVAAPGTYAGMVERLDYLKSLGVNAIELLPVFEFNELEYYSQIPGSDQYRFNFWGYSTVNYFSPMGRFSAAVGQGAPARASCDEFKQLVKECHRRGIEVILDVVFNHTAEGNERGPTISFRGLDNRVYYMLAPGGEYYNYSGCGNTLNCNQPVVRQFILDCLKHWVTEYHVDGFRFDLASILTRAHSAWHPQQYDQETGQRVAMSSGGAIVTAEGIMTDGAGVPTGYPLADPPLVESISEDPVLRNTKMIAEAWDCDGLNQVGAFPHYGGRWSEWNGKFRDVVRNFIKGTDGPWAGDFASAICGSPNIYANNTPHETDWWANNGGRQWKGGRGPHASINFVAAHDGFTLADMVAYNNKHNEANGENNRDGEQHNNSWNCGEEGPTTKWEVNRLRQRQMRNLTGALLLSCGVPMINMGDEYGHSKNGNNNTYCHDSELNYLRWDQLAEDPHGFNRFVRLLIHFRRATPALQRTTFVNDKDIQWHGELPNTPDWTDTSRLVAFTLHDGKGGGLYVAFNTSHLPKLLQLPKWGGRVWQPLVDTSKVAPYDFLAVDGVLSAEDVAAARRQMAMWTADHTYPVLPWSCIVLQSAPEDPAATSMIK

SEQ ID NO: 385 - DNA, 1962 bp, Paenibacillus sp
  CDS (1)..(1962): transl_table=11
atgtttctggaagctgtgtatcaccgtccgcgcaaaaactggtcctatgcgtacaacggcaccaccgttcatcttcggatccgcaccaagaaagacgacatgaccgccgtctatgctctcgccggtgacaagtacatgtgggaccacacgatggagtatgtcccgatgaccaagctggcgacagacgagctgttcgactactgggaatgcgaggtgaccccgccgtaccgaagagtgaaatacgggtttctgctgcagcagggtcatgagaagcgctggatgaccgagtatgattttctgaccgagccgccggccaatcccgaccgactgtttgagtacccgttcatcaaccctgtcgatgtgttccagccgccggcatgggtgaaggatgccatcttctatcaaattttccctgaacggtttgccaacggggatacccgcaatgatcccgaaggcacgctgccatgggggagtgccgatccgacgccaagctgcttctttggcggtgatctgcaaggcgtcatcgaccacctcgatcatctgagcaagctgggcgtgaacgccgtatacttcaccccgctctttaaggcgaccaccaaccataagtacgatacggaggattattttcagattgacccgcagttcggggacaaggatacgctgaagaagctcgtcgatctgtgccatgagcgcggaattcgcgtcctgctggacgccgtgttcaaccattccggccgaaccttccctcccttcgttgatgtcctcaagaacggggagaagtccaaatacaaggactggttccatatccgctccctgccgcttgaggtggtggacggcattccgacgtatgatacctttgcctttgaaccgctgatgcccaagctcaataccgagcatccggaagtgaaggaatacttgctgaaggccgcggaatactggattcgcgaaacggggatcgacggctggcggctcgatgttgccaatgaggtgagccaccagttctggcgcgagtttcgccgggtggtgaagcaagcgaaccccgatgcctatattctgggcgatgtatggcatgaatcgtccatctggctcgagggcgaccagttcgatgcggtgatgaactatccgttcaccaacgccgtccttgatttcttcattcatcaaatcgccgatgccgagaagttctccttcatgctcggcaagcagcttgccgggtatccgcgccaggccagcgaagtcatgttcaacctgctggacagccatgacaccgccagattgctgacccaagcggatggcgacaagcggaagatgaagctggcggtgctgttccagttcacctacttcggcaccccgtgcatctattatggggacgaggtcggccttgatggcgggcatgacccgggatgccgcaaatgtatggaatgggacgagacgaagcatgacaaggatctgttcgcgttctaccagacggtcatccggctccgccaagctcatgctgctctgcgcaccggcaccttcaagttcctcacggccgagaagaacagccggcagattgcttacctgcgtgaggacgaccaagatacgatcttggtcgtcatgaacaacgacaaggcgggccacacgcttacgctgcctgtccggcatgcacagtggacccatctgtggaacgacgatgtcctgaccgctgctcacggacagttgaccgtgaagctcccggcttacggctttgccgtgctgaaggcctcatccgattggtcatcatgggggcgccctccgttcactggcgaacacgccagcccgagcaagcggggcgcctctttttgtcgctccccctcctttcccttgacatcatcacattggcttgacccggtatcaacgttatcatgctcatgggttcagttatttagtaaattagtaaattataaatttagtgaacaattgagctgcatgtcattgaaatcatga

SEQ ID NO: 386 - protein, 653 aa, Paenibacillus sp
MFLEAVYHRPRKNWSYAYNGTTVHLRIRTKKDDMTAVYALAGDKYMWDHTMEYVPMTKLATDELFDYWECEVTPPYRRVKYGFLLQQGHEKRWMTEYDFLTEPPANPDRLFEYPFINPVDVFQPPAWVKDAIFYQIFPERFANGDTRNDPEGTLPWGSADPTPSCFFGGDLQGVIDHLDHLSKLGVNAVYFTPLFKATTNHKYDTEDYFQIDPQFGDKDTLKKLVDLCHERGIRVLLDAVFNHSGRTFPPFVDVLKNGEKSKYKDWFHIRSLPLEVVDGIPTYDTFAFEPLMPKLNTEHPEVKEYLLKAAEYWIRETGIDGWRLDVANEVSHQFWREFRRVVKQANPDAYILGDVWHESSIWLEGDQFDAVMNYPFTNAVLDFFIHQIADAEKFSFMLGKQLAGYPRQASEVMFNLLDSHDTARLLTQADGDKRKMKLAVLFQFTYFGTPCIYYGDEVGLDGGHDPGCRKCMEWDETKHDKDLFAFYQTVIRLRQAHAALRTGTFKFLTAEKNSRQIAYLREDDQDTILVVMNNDKAGHTLTLPVRHAQWTHLWNDDVLTAAHGQLTVKLPAYGFAVLKASSDWSSWGRPPFTGEHASPSKRGASFCRSPSFPLTSSHWLDPVSTLSCSWVQLFSKLVNYKFSEQLSCMSLKS

SEQ ID NO: 387 - DNA, 1548 bp, Halothermothrix orenii
  CDS (1)..(1548): transl_table=11
gtgaagctaaaacgcttgtctttcttcatgtttgttaccttactggtatttatatctgtttttcctgtttatgcaaacgatttcgaaaaacatggtacatattatgaaatttttgtcaggtctttttatgactctgatggtgacggaataggggatttgaaaggtataatagaaaaactggattatcttaatgatggagaccctgaaaccattgctgatctgggggttaatggtatctggttaatgcctatctttaaatctccctcctatcatggctatgatgtaaccgattattataagattaatcctgactacgggactctggaagacttccataagcttgttgaggctgcccatcaaaggggaatcaaggttataattgatttacccatcaatcataccagtgaaagacatccctggtttctcaaggcttcccgggataagaatagtgaatacagggattattatgtctgggctggccccgataccgataccaaagaaaccaagttagatggaggccgggtctggcattattccccgaccggcatgtattatgggtatttctggagtggcatgcctgatttaaactataataaccctgaagttcaggaaaaggttattgggatagcaaaatactggttaaaacagggggttgatggtttcaggcttgatggagccatgcatatcttcccaccggcccagtatgataaaaactttacctggtgggagaagttccgtcaggaaattgaagaggtaaaacccgtttacctggtgggtgaggtctgggatatttcggaaacggtagctccttacttcaaatatggttttgattctacctttaactttaaactggcagaggcagttatcgctacggctaaagctggatttccctttggttttaataaaaaggcaaaacatatttacggggtatatgacagggaggttggatttgggaattatatcgatgctcccttcctgaccaaccatgatcagaaccggattttggaccagcttgggcaggatcgtaataaggccagggttgctgccagtatttatttgaccttgcctggtaatccctttatttactatggtgaagaaatcggtatgagggggcaggggccccatgaagttatcagggagcccttccagtggtataatggatccggggagggagaaacatactgggagccagccatgtataatgatggctttacttctgttgaacaggaagaaaagaatctcgattccctcttaaatcactacaggaggttaatccatttccggaacgaaaatcctgtcttttataccggtaagattgagattataaatggaggattaaatgtagttgcatttagaagatataatgataagagggatttatatgtctaccataacctggtaaacagaccggttaaaataaaagtggctagtggtaactggaccttattgtttaattcaggtgataaggaaattacccctgttgaagataataataaacttatgtatactatccctgcttatactaccattgttctggaaaaggagtaa

SEQ ID NO: 388 - protein, 515 aa, Halothermothrix orenii
MKLKRLSFFMFVTLLVFISVFPVYANDFEKHGTYYEIFVRSFYDSDGDGIGDLKGIIEKLDYLNDGDPETIADLGVNGIWLMPIFKSPSYHGYDVTDYYKINPDYGTLEDFHKLVEAAHQRGIKVIIDLPINHTSERHPWFLKASRDKNSEYRDYYVWAGPDTDTKETKLDGGRVWHYSPTGMYYGYFWSGMPDLNYNNPEVQEKVIGIAKYWLKQGVDGFRLDGAMHIFPPAQYDKNFTWWEKFRQEIEEVKPVYLVGEVWDISETVAPYFKYGFDSTFNFKLAEAVIATAKAGFPFGFNKKAKHIYGVYDREVGFGNYIDAPFLTNHDQNRILDQLGQDRNKARVAASIYLTLPGNPFIYYGEEIGMRGQGPHEVIREPFQWYNGSGEGETYWEPAMYNDGFTSVEQEEKNLDSLLNHYRRLIHFRNENPVFYTGKIEIINGGLNVVAFRRYNDKRDLYVYHNLVNRPVKIKVASGNWTLLFNSGDKEITPVEDNNKLMYTIPAYTTIVLEKE

SEQ ID NO: 389 - DNA, 1533 bp, Paenibacillus sp
  CDS (1)..(1533): transl_table=11
atgctcacgatgttcgcctcaggtgcaatggctgagcaagaaatgaatgggcataagcctccaaattctgttggaagcggcgtgttttacgaaatttatattaattctttttatgattcgaatggggacggacacggtgatttgaaagggattacacaaaagcttgattacttaaacgacggcaacccccgttcgggcaaggatttgcaggttagtggcctctggctcatgcccatgaatccatctccaagctaccataaatatgatgttaccgactattatcaggtggacccccagtatgggaatctgaatgatttccgcaccttgacgaaagaagccaaacggaagggtgtcaaggtgatcatagaccttgttatcaaccattcgagcagtgagcacccttggttcaaggaggccagcaccaatccacaaagcaaataccatgactattacgtatgggcaaatgagaagacaaatctggatgaaaagggatcatggggccagcaggtatggcataagaatccgaatggcgaagggtatttctatggtaccttctggtcggggatgccagatctgaactttgacaatccagaagtccgtaaggaaatgattaaagtcggtaagtattggctgcagcagggtgcagatggtttccggcttgatgcggcgatgcatatctttaaagggcaaacgaaggatggtgccgataaaaacattgcgtggtggaatgagttccgttccgagatggaaaagattaatccaaatgtatatctggcaggagaggtatgggataagccggagaccatagctccttattacgaatcactccactctttgtttaattttgacctgggcggaaagatattgaactctgtgaaaaacggccgggatcagggtatcgcaacattcgctgagaaaacactgaagctgtacaaatcacacaataaagcggcacttgatgccccgttcctaagcaatcatgaccagacccgtgttatgagcgaactgggtggggatgtgcgaaaagccaagctgcctgcatccattcttttgacgctgccaggtcagccgtttctctattacggtgaagagatcggcatgaaaggggagaagcctgatgagtatcttcgagagcctatgcgctggtacaaaggagaaggccgcggtcaaacgacgtgggaagtacccaaatacaaccgaggcgaagtatcggtagaagcgcagatgcgggacaatgattccctgctacaaagctaccgcacgctcatccgtttgagggaagaacatgaagctcttcgtagccataatctagaaccaatccaagcaggttctgccaacgtggcggcataccaacgttcttctggcaaagaaacattgtatgtatatcacaacctgtcagggaagccggttacgctccagatgaaagatgcggataagcagaagaggaaagtggtcttttccagctccaagggtgtaaaaataaagaaaaatgcggtgacgattcccgcatacagctctctaatcaccaaatag

SEQ ID NO: 390 - protein, 510 aa, Paenibacillus sp
MLTMFASGAMAEQEMNGHKPPNSVGSGVFYEIYINSFYDSNGDGHGDLKGITQKLDYLNDGNPRSGKDLQVSGLWLMPMNPSPSYHKYDVTDYYQVDPQYGNLNDFRTLTKEAKRKGVKVIIDLVINHSSSEHPWFKEASTNPQSKYHDYYVWANEKTNLDEKGSWGQQVWHKNPNGEGYFYGTFWSGMPDLNFDNPEVRKEMIKVGKYWLQQGADGFRLDAAMHIFKGQTKDGADKNIAWWNEFRSEMEKINPNVYLAGEVWDKPETIAPYYESLHSLFNFDLGGKILNSVKNGRDQGIATFAEKTLKLYKSHNKAALDAPFLSNHDQTRVMSELGGDVRKAKLPASILLTLPGQPFLYYGEEIGMKGEKPDEYLREPMRWYKGEGRGQTTWEVPKYNRGEVSVEAQMRDNDSLLQSYRTLIRLREEHEALRSHNLEPIQAGSANVAAYQRSSGKETLYVYHNLSGKPVTLQMKDADKQKRKVVFSSSKGVKIKKNAVTIPAYSSLITK

SEQ ID NO: 391 - DNA, 1767 bp, Bacillus stearothermophilus
  CDS (1)..(1767): transl_table=11
atgaggaaagaagccatccaccaccgctcaaccgaccatttcgcttatgcttatgacagcgagacgctccatctccggcttcaaacaaagaaacatgatgtcgaccacgtcgagctgctttttggcgacccgtacgaatggcacgatggcgcctggcagtttcaaacgatgccgatgcggaaaacgggaagcgacgggttgtttgactattggctcgccgaagtcaaaccgccatatcgacggctgcgctatgggtttgtgcttcgagctggggacgagaaactggtctatacggaaaaaggattttaccatgaagctccgagcgacgacaccgcttactacttttgcttcccctttcttcatcgggtcgacctattccaagcgccggactgggtaaaagacacagtatggtatcaaattttccccgagcggttcgccaacggcaacccggccatcagtccgaaaggggcgcggccgtggggaagcgaggacccgacgccgacgagctttttcggcggcgacttgcaaggaatcatcgatcaccttgactatttggctgatctcggcatcaccggcatttacttgacgccgattttccgcgcgccgtcgaatcataaatacgacaccgctgattattttgaaatcgacccgcactttggggacaaagagacgttgaaaacacttgtcaagcgctgccatgaaaaagggatccgcgtcatgctcgatgcagtcttcaatcattgcggctatgagtttgccccgtttcaagatgtgttaaaaaacggtgcagcgtctaggtataaagattggttccatattcgcgagtttccgctccaaacggagccgcgcccgaattacgacacatttgcgttcgtgccgcaaatgcccaaactcaataccgcccatccggaagtgaagcgctacttgcttgatgtcgcgacgtactggattcgcgagtttgatattgacggctggcggctcgatgtggcaaacgaaatcgatcaccaattttggcgcgaattccgtcaggcggtgaaggcgctaaagcccgatgtgtacattctcggcgagatttggcatgatgccatgccgtggctgcgcggcgaccaatttgacgccgtcatgaactacccgttcacggacggagcgcttcgctttttcgcgaaagaggaaatcagcgcccgccagtttgccgatatcatggtccggttgcttcattcgtatccgaaacatgtgaacgaagcggcgtttaacttgcttggcagccatgatacaccaaggctgctcactgtttgcggcggcgacgtccgcaaagcgaagttgttgtttttgttccagctcacgttcactggttcgccgtgtatttactatggcgatgagatcggcatgacgggtggaaacgatccggaatgccggaaatgtatggtgtgggatacagagaagcaaaacaaagaactgtatgaacatgtcaagcaactgatcgctcttcgcaggcaatatcgggcgcttcgacgcggcgatgtcgcttttctcgccgccgatgatgaagcgaaccatcttgtttatgaaaaaacggatggcaatgaaacggtcatgatcatcatcaaccggagcaacgaagcagcagaaattcccatgccgatcgatgcgcgtggaaaatggctggtcaaccttctgacaggggagcggttcgctgcagaggcggaaacactttgcgtctccttgccgccgtacgggtttgtgctttacgcggtcgaaagctggtaa

SEQ ID NO: 392 - protein, 588 aa, Bacillus stearothermophilus
MRKEAIHHRSTDHFAYAYDSETLHLRLQTKKHDVDHVELLFGDPYEWHDGAWQFQTMPMRKTGSDGLFDYWLAEVKPPYRRLRYGFVLRAGDEKLVYTEKGFYHEAPSDDTAYYFCFPFLHRVDLFQAPDWVKDTVWYQIFPERFANGNPAISPKGARPWGSEDPTPTSFFGGDLQGIIDHLDYLADLGITGIYLTPIFRAPSNHKYDTADYFEIDPHFGDKETLKTLVKRCHEKGIRVMLDAVFNHCGYEFAPFQDVLKNGAASRYKDWFHIREFPLQTEPRPNYDTFAFVPQMPKLNTAHPEVKRYLLDVATYWIREFDIDGWRLDVANEIDHQFWREFRQAVKALKPDVYILGEIWHDAMPWLRGDQFDAVMNYPFTDGALRFFAKEEISARQFADIMVRLLHSYPKHVNEAAFNLLGSHDTPRLLTVCGGDVRKAKLLFLFQLTFTGSPCIYYGDEIGMTGGNDPECRKCMVWDTEKQNKELYEHVKQLIALRRQYRALRRGDVAFLAADDEANHLVYEKTDGNETVMIIINRSNEAAEIPMPIDARGKWLVNLLTGERFAAEAETLCVSLPPYGFVLYAVESW

SEQ ID NO: 393 - DNA, 6057 bp, Bacillus stearothermophilus
  CDS (1)..(6057): transl_table=11
atggtgaagggaagatggagaaagtatgtcgcttatttctcaatctttttgctttttgcccagttgttttcatttagcgcaatcgttcgcgcaaatgaatcggtgcaaagccctgttgtgaacggaaacgatgtgacgtttcgctacgttggaacaggggaagagcagtctgttttgctcgctggatcgtttaatgactggcaaacagatggtgagaaaaagattgaattaacgaaagaaagcgatcatatttggtcagtaacaaaaacgcttccagatggaacgtacatgtacaaattcgttgtagacggaaattggatgacagatccattaaataacaacaaagcagatgatggatatggcggaaaaaatagcgtcgttgtagtcggtcaacctgctcagcagcaggagcgcgttgtgacgctcgtcggcaatttacaaaatgagcttgggcatgaaaaagagtgggatccggcagcgacagctaccgtcatgaagcatgaaggaaacggcttgtacacgttcacaggtgtactcccggcaggtacgtatgagtacaaaatcgcgataaatggaagctgggatgaaaactatggtgcgggtggccggaacggtggaaacatttctttcacgctcgaaaaagaaacggaagtaacgttttattaccacgatagtactcatgcgatcgctgattcaacgtggtatacgccgattccaaaagaaaaacagccgcgattagtcggaacgattttgcctgcgatcggctatgaaaaagaagttgatggttggacgccagagacgtcgagtgcatttttagtcgataataacttcgacttcatttacacatttactgctcgtgtaccaaaaggaaactatgaatttaaagtgacgttagggaatagttgggatgaaaattatcctcaagataatgctaagttaaacgtattagaagaaacgacaattacgttcttctttaacgcaaaaacaaaggagctatatacagactacagtccaacaggttcggatggcaacgttcaaaaagatcgtttaaagcataatacgtgggactctttatatcgtcagccgtttggagcagtgaaagcaggaacggaagtgacgttacgtttagctgcgaaaaaaggcgatgtaacgaaagcgaacgtgtatgtgaagaatacaacgacaggaacggcgaagttgtacgcgatgagcaaagtaggagtgatcggagacgatgagtattgggaagcgacattcactcctgaagaaaaagggttatatggctataaatttatcgcgatggacggtgcagctaaagcagagtatggtgaggatacacaagaaggtcaatggggacgagcggcagataagaacgtagaattattccaattgactgtatacgatccaaactataaaacgccagattggatgaaacaggcggttgtataccaaattttccctgatcgtttctttaatggaaatccaaataacgacaaagtgaaaaaatatgcgcgtggaaatgaaccgattgaacatcgggagtggtcggaacttccagataatccacgtatgaaagctactcctggatatgacggtgacggtatttggtccaacgacttttttggtggagacattgctggtattgaacaaaagctagattacttgcagtctttaggtgtaaatacgatttacttaaacccgattgcgcatgcgccatcaaaccataagtatgatgcgcacgattataaagcaatcgatccgatgtttggcacgcctgaagaatttgaatcattcgtgcaagcggttgcatcgcgcggtatgcaccttattttagatggggtatttaaccacgtatcggatgactccatttattttgatcgttacggaaaatatccgactgttggggcatatgaatattggtcggctgtatacgatttaatgaacgataaagggttgtcggaagaggaagcgcgtgttcaagtagaacaaaagtttaaagatgagggacaacagttcagtccgtacggattccatttatggtttaatatcgagaatgaaaaagtaaacggtgcatataaatatcaagcatggtggggatttgatagtttaccagaatttaagtctatttctggaacgaaagtaccgtatgcgagcgaattaaacaatgagcaactcgcaaactacattttttacgagcaagattccgtcgcaaaaagttggattacgcgcggggcatccggttggcgtttagatgtagccaatgaggtggatacggagttttggcgcgagtttcgtaaagagttgttgcaaggtgactatgaccgtgggccaacgctcaaaagcggacaacaaccgttaattctcggtgaaatttgggatgatgcatcaaaatacttccttggtgatcaatacgattcagttatgaactaccgtttccgcggcgctgtattagactttttacgaaacggtaaagcagaggaaatcgatgcgcgattaacagctattcgtgaagattatccggaagaagctttttatgcgctaatgaaccttatcggctcgcatgatacggcgcgtgcagtgtttttacttgggaacggaacagattcgtatgagcgtgctgaacttgatccgaactataatgaacaactcggcaaaaagcgattgaaactcgcggcgattttgcaaatgggttatccaggagcaccaacgatttactacggcgatgaggcaggtgtaacaggttcaaaagatccagatgatcgtcgtacgtatccgtggggaagcgaagatacggagcttattgcacattatcaaaaagtaggtactgttcggacagaacatcaagatgtgttagcgaaagggacaattgagacagtatatgcgaaaggtgatgtgtacgtctttgcccgtcagtacggaaaagatgttgcgcttatcgcgataaaccgtgggaatagtgcacaaacggtacagttggatgtttcttcaatcattccgaatggaacaagctttgttgatgaactacatggcgaatatgaagtgacagtatcgaacggaaaggtacagctaaacattcctgcatttgatggacgcatgttgtttggaaaagtaactgttaatatgccgaatgaagtgacgaacgttcaagcaacagcaggcgttggacaagtgacattaacgtgggaaggtgatgcaccgacttatcgtatttatcaatccacgttaaaaggtgcaggttatacgctcgtgaaagagacgaatgagaaagaggctgtcattggtggtctgaaaaatggaacagcgtattattttgctgttacagctgttgatgaaaacggaaatgagtcggctaaagtagaaacgaatcgcgtcgtaccacattatcctttagatgagcagcatattgtacatgtggacatcgtaagcgatgacgttttggacttggcaaaagcgatcgttgttgaggcgaaagtgcgcattgatgatgtaacaaagcacggcttagcggacggtttacaagccgtattacaagtgaaaagaccgaatcatgaaaagtgggaaaacgtgcaagcggcatacgaacgtcaagacggtgaagataacgtattccgagcatcgtttattccgttagcttcaggaacatacacgtatcgttacggctttacaacaaatctcggtgacagttgggtgtatacagaagaaaaaacgtttacactcgctgcaaatgaggcagatcaacaagcaccagcaaagggcattcagctcgtgcaaccagatgtcgaatctggtcaagtaaatttatcatggtcgtttgttgaaagagacgatcatgatgcttatatggtagtcattgagcgcgacggtcaagtgatttatacgacaacaacgattagtacatcatttacagattatgatgtagaaaacggaaaaacgtacacatatgtcgtaaaattgtacgaccgagcaggaaatgttgtcgaatccaatgcggtggaagtaacaccgaacatcgttatggttcaagtgacgtttaaagtgagagcgcctagttacacgccgttagatacgcgcattactattccaaacagcttgaacggttggaacacaggagcttgggaaatgacgcgtggtggagcggtaacatcggattgggagtttacaacggaactgcaagaaggtgagacgatcatctacaaatatgtaaaaggagcgtcttgggatcaggaaggattagctgatcatacacgtgatgatcaaacagatgatgacgttagctattatggctatggcgcaatcggaacggatttaaaaattacggtacaaaatcaaggcaataacaaaatgatcattcaagattacattttgcgttggatcgatatgcctgtcgttattgaagaagtgaaaaaagatggcgatcgcgtcacgataaaaggaaacgccatcaaaggcggtgtgcttacgatcaataaagaacgtgtaacgattcacgatgatatgtcatttacgtacacgttcacaccgaatgcaaaccaaaaagaagtagctatccatattgagccttctgaagaaagtaaggcgaatattttcaaaaatgacggtggagccattgcgaaaaatacgaaaaattatgtgttaaacattgaaacgaagcaattacgtgaaggggtgttaactgagcagccagatagcggcacgacaccaggaagcggcacgacaccaggaagcggcacaacaccaggaagcggcacaacaccaggaagcggcacaacaccgggcagtggtacaacaccaggaagcggcacgacaccaggcagtggtacaacaccaggcagtggtacaacgccagaaaaaggtgcagttgtcgttgagccgaaagtggaagtgaaagagagagatggaaaagttgttgaaaaagttgctgccgtttcgtcgaacgatatcgcaacgattgtcaacgaactttcgaatgaaaagaaacaagtcgtcatttccacaggttcgctcgttaaagatgtagcaacaaaagtagacgtacctgcgtcgttgtttgttcaagcagcgaataagcaatccgatgcgacgattgttagtgcgagtgaacaagcggtgtataaattgccagcaaaagaagtgaagcaagcagtagatcaagtggctaaacagctcggaacgacggtagatcaagtaagcatttccatcgagatgaaagtaaaagatgcgccacaattaccggttaaaacgttgtctgatgcggtacagttccacgttgtcgcaaaagcaaatggaaaggaacaagccattgatcgctttactcaatatgtcgagcgagagattgcgctcaaacaacctgttcagccaaatcgcgcggtagttgtgcgcgtaaacgatgatgggtcattgactccagtaccgacaacgttcgtcgatcaaaaagcggtagcgaagtcgttaacgaactcgacgtatgttgttgtcgaaggaacaacgacgtttgcggatatcgttcaacattgggcgaagccgtatattgattcgttggcagcaaaacagctcgttcgcggggtaacagagacggcgtaccgaccaaatgagccgatgacgcgtgcacaatttgccgtattgcttgtgcgtgccctcgcgttgcctagtgaaacatatgatgggcgatttgccgatgtgaaaggaacagaatggtttaaccaacatggtgaacttgctgcggcggtgaagtatggtgtgattcaaggaaagacgccaagcacgtttgcaccaaatgagccgattacacgcgcgcaagcagctgtcatgatcgagcgtgctcttaacctttcgtttgtcaactttgacaaggcggcaaaagatcaaacgaagaaactagcggatttccgtgatgcgaatcaattgccagcatggtcaaaacaagctattgaagcaatatatcaagcagggatcgtacaaggtcacccagacggtacatttgccccagcaggtcgaatgacacgtgcagaaatggcaaaggtgttagcagaatttttagcaaaggcgaagttgatgtaa

SEQ ID NO: 394 - protein, 2018 aa, Bacillus stearothermophilus
MVKGRWRKYVAYFSIFLLFAQLFSFSAIVRANESVQSPVVNGNDVTFRYVGTGEEQSVLLAGSFNDWQTDGEKKIELTKESDHIWSVTKTLPDGTYMYKFVVDGNWMTDPLNNNKADDGYGGKNSVVVVGQPAQQQERVVTLVGNLQNELGHEKEWDPAATATVMKHEGNGLYTFTGVLPAGTYEYKIAINGSWDENYGAGGRNGGNISFTLEKETEVTFYYHDSTHAIADSTWYTPIPKEKQPRLVGTILPAIGYEKEVDGWTPETSSAFLVDNNFDFIYTFTARVPKGNYEFKVTLGNSWDENYPQDNAKLNVLEETTITFFFNAKTKELYTDYSPTGSDGNVQKDRLKHNTWDSLYRQPFGAVKAGTEVTLRLAAKKGDVTKANVYVKNTTTGTAKLYAMSKVGVIGDDEYWEATFTPEEKGLYGYKFIAMDGAAKAEYGEDTQEGQWGRAADKNVELFQLTVYDPNYKTPDWMKQAVVYQIFPDRFFNGNPNNDKVKKYARGNEPIEHREWSELPDNPRMKATPGYDGDGIWSNDFFGGDIAGIEQKLDYLQSLGVNTIYLNPIAHAPSNHKYDAHDYKAIDPMFGTPEEFESFVQAVASRGMHLILDGVFNHVSDDSIYFDRYGKYPTVGAYEYWSAVYDLMNDKGLSEEEARVQVEQKFKDEGQQFSPYGFHLWFNIENEKVNGAYKYQAWWGFDSLPEFKSISGTKVPYASELNNEQLANYIFYEQDSVAKSWITRGASGWRLDVANEVDTEFWREFRKELLQGDYDRGPTLKSGQQPLILGEIWDDASKYFLGDQYDSVMNYRFRGAVLDFLRNGKAEEIDARLTAIREDYPEEAFYALMNLIGSHDTARAVFLLGNGTDSYERAELDPNYNEQLGKKRLKLAAILQMGYPGAPTIYYGDEAGVTGSKDPDDRRTYPWGSEDTELIAHYQKVGTVRTEHQDVLAKGTIETVYAKGDVYVFARQYGKDVALIAINRGNSAQTVQLDVSSIIPNGTSFVDELHGEYEVTVSNGKVQLNIPAFDGRMLFGKVTVNMPNEVTNVQATAGVGQVTLTWEGDAPTYRIYQSTLKGAGYTLVKETNEKEAVIGGLKNGTAYYFAVTAVDENGNESAKVETNRVVPHYPLDEQHIVHVDIVSDDVLDLAKAIVVEAKVRIDDVTKHGLADGLQAVLQVKRPNHEKWENVQAAYERQDGEDNVFRASFIPLASGTYTYRYGFTTNLGDSWVYTEEKTFTLAANEADQQAPAKGIQLVQPDVESGQVNLSWSFVERDDHDAYMVVIERDGQVIYTTTTISTSFTDYDVENGKTYTYVVKLYDRAGNVVESNAVEVTPNIVMVQVTFKVRAPSYTPLDTRITIPNSLNGWNTGAWEMTRGGAVTSDWEFTTELQEGETIIYKYVKGASWDQEGLADHTRDDQTDDDVSYYGYGAIGTDLKITVQNQGNNKMIIQDYILRWIDMPVVIEEVKKDGDRVTIKGNAIKGGVLTINKERVTIHDDMSFTYTFTPNANQKEVAIHIEPSEESKANIFKNDGGAIAKNTKNYVLNIETKQLREGVLTEQPDSGTTPGSGTTPGSGTTPGSGTTPGSGTTPGSGTTPGSGTTPGSGTTPGSGTTPEKGAVVVEPKVEVKERDGKVVEKVAAVSSNDIATIVNELSNEKKQVVISTGSLVKDVATKVDVPASLFVQAANKQSDATIVSASEQAVYKLPAKEVKQAVDQVAKQLGTTVDQVSISIEMKVKDAPQLPVKTLSDAVQFHVVAKANGKEQAIDRFTQYVEREIALKQPVQPNRAVVVRVNDDGSLTPVPTTFVDQKAVAKSLTNSTYVVVEGTTTFADIVQHWAKPYIDSLAAKQLVRGVTETAYRPNEPMTRAQFAVLLVRALALPSETYDGRFADVKGTEWFNQHGELAAAVKYGVIQGKTPSTFAPNEPITRAQAAVMIERALNLSFVNFDKAAKDQTKKLADFRDANQLPAWSKQAIEAIYQAGIVQGHPDGTFAPAGRMTRAEMAKVLAEFLAKAKLM

SEQ ID NO: 395 - DNA, 1983 bp, Thermococcus sp
  CDS (1)..(1983): transl_table=11
atgtataaaattttcggatttaaagacaatgactaccttggaaaggttggaatcacagagttttctatacctaagagcggttcctatgcctaccttttaggaaattttaatgcattcaatgaaggaagctttagaatgagggaaaagggagatagatggtatataaaggtagagcttcctgagggaatctggtactatacattttcggttgatggaaatttaatattagattttgaaaataatgaaaaaactgtgtatagaaggctttcatataaatttgaaaaaactgttaatgttgctaaaatcttctcgggagagaaattttaccattatccctctttggtctatgcttattctttgggagactcaacatacattcgctttagagccatgaagggagtggctaaaagagtgtttttaatttcagaccaaaaatatgaaatgagaaaaaaagcacaagatgaactctttgagtattttgaagcagttctacccagaaaagaaggacttgagtattattttgagattcatgaagcagatgaaattattgattatggagactttaaggtagattttaacgagcagaaggaaaggtttaagccacctgcatgggtctttgagagagtcttttatcaaataatgcccgatcgctttgctaatgggaatccagagaatgacccgcataattgtatagaatttaaaactatcactcaccacggcggtgatcttgagggtattatagagaaacttgactacattgaggaactcggtgttaatgcactttacctaaccccgatcttcgagtcaatgacatatcacgggtatgacatagtggactactatcatgttgctcggaaattcgggggagatgaagcttttgaaaaattaatgcaaaagctgaagaaacgggatataaagcttattttagatggagtttttcatcataccagcttttttcatccctactttcaagatgtagtgaaaaatgggaaaaacagtaagtacaaagatttttatcgtataatcagttttccagttgttccagaggagtttttcgagattttaaactcgaagctcccatgggatgaaaaatataggcggcttaaatcccttaaatggaactacgagagcttttattctgtatggctaatgcctcgtttaaaccacgacagcaaaggagtaagagaattcattaggaatataatggagtactggattaaaaaaggcgccgatggctggaggttggatgttgctcatggagttccacctgaagtatgggaagaaattagagaaaagttgcccagtaatgtgtatctagttggagaagtgatggacgatgctaggttgtggatattcaacaagttccatggaaccatgaactatccattgtatgaggcaattttgagattttttgtaacaagagaaattaacgcagagcaattcttgaactggcttgaacttttgagcttctactacggccctgctgagtacgtgatgtataatttcttagataaccatgatgtggatagaatgcttagcctgcttggagacaagagaaaatatctctgcgccttggtttttcttttcacgtacaagggagttccgtctatttactatggtaatgaaattgggatgaaaaatatagaggctccttttatggagcgttcaagggcacctatggaatggaataagaagaaatgggataaagaaatccttaaaactacaaaagagttgataaagttgagaaggagaagcaaagctttgcaaaaaggtatttttaaaccagttaaattcaaagacaaattattggtctataaaagagtgttaaataacgaaaacatcttagtagcaatcaactattcaaagaaagaaaagcatctagatttaccaccttcctttgaaatactctttcaaagtggatcattcgacagagtgaatatccgattaaaaccattttccagtattattgctaaaaagttgtag

SEQ ID NO: 396 - protein, 660 aa, Thermococcus sp
MYKIFGFKDNDYLGKVGITEFSIPKSGSYAYLLGNFNAFNEGSFRMREKGDRWYIKVELPEGIWYYTFSVDGNLILDFENNEKTVYRRLSYKFEKTVNVAKIFSGEKFYHYPSLVYAYSLGDSTYIRFRAMKGVAKRVFLISDQKYEMRKKAQDELFEYFEAVLPRKEGLEYYFEIHEADEIIDYGDFKVDFNEQKERFKPPAWVFERVFYQIMPDRFANGNPENDPHNCIEFKTITHHGGDLEGIIEKLDYIEELGVNALYLTPIFESMTYHGYDIVDYYHVARKFGGDEAFEKLMQKLKKRDIKLILDGVFHHTSFFHPYFQDVVKNGKNSKYKDFYRIISFPVVPEEFFEILNSKLPWDEKYRRLKSLKWNYESFYSVWLMPRLNHDSKGVREFIRNIMEYWIKKGADGWRLDVAHGVPPEVWEEIREKLPSNVYLVGEVMDDARLWIFNKFHGTMNYPLYEAILRFFVTREINAEQFLNWLELLSFYYGPAEYVMYNFLDNHDVDRMLSLLGDKRKYLCALVFLFTYKGVPSIYYGNEIGMKNIEAPFMERSRAPMEWNKKKWDKEILKTTKELIKLRRRSKALQKGIFKPVKFKDKLLVYKRVLNNENILVAINYSKKEKHLDLPPSFEILFQSGSFDRVNIRLKPFSSIIAKKL

SEQ ID NO: 397 - DNA, 2181 bp, Thermococcus sp
  CDS (1)..(2181)
atgagacggcgctttggggctcttcttttgctaatgttcatgttaaatataatagcatcaggatgccttcaatcacccacaacccaagagctaaaacttccctcaggaaactatccccccatctacataaacgaaaaaagccaaaatatgtgtccaccaggtaaagtgcccgtcacgttcagataccaaccagaagaaaacgttacttctgtgagtctgcgaggaagctttaacgactggggagaactgcccatgaaaaatgagaatggaacatgggtaaggacagtatgcttaaatcccggcagatacgaatacaaattctttgtagatggcgaatggataaaagatatgtcagcagttgatcccacagcagatgcttacgtagatgacggatttggcggaaaaaacgccgttaaaatcgtaaaaggggaacaaggcctgataatagaacacgaccctaagaaccccgcttatctatcgattgccgataatagaacggtaattaggttcaaggtacaacccaaccagatacaatcggcatttctcgtggcttccaatggagaatacaaaatggagcgtcagctatggtgggggtctggagaagtctggagagtggagattcaagaggtaagccccatagaatactacttcaaactcacaacaaacaatggagaggttctcgtccttaatacctccaaaaatccattcttcacctttgatgggataaacaggttcccccaagtggagtgggtgagcaaaggaataggctaccagatatttccggatcgctttaataacggtgatccaagcaatgatgcattagctctccaaaccgatgagttttggtttaatgagcttataaatgaaaggcccattctatcaaattggagcgacccaataagcccacttcactgctgtcaccagtactttggaggagatataaaagggatactcgaaaagctggattaccttcaagaacttggggttactgttatctacctaaacccgatatttctagctggaagcgctcacggttacgatgtatacgaccattaccgcctcgatccacagtttggaagcgaagaagacctaaagattctcattgaagaagctcataagagaggtataagaattatctttgactttgtccccaaccacagcggaattggacattgggcgtttctggatgtggcatcaagaggaaagaaaagcccttactggaactggtactttgtgcagagatggccatttaagttgggagatggaaaagcatatcttgggtggtggggactcggaagtttgcccaagctcaacacagccaatccagaggtcaaggaatatttaataggtgccgcactgcactggcttgactttggctttgacggcattaggatagatgcgccacaagagctcataaacgccgaggaatttttctccgagctaaggaaagccatcaaggaaaagcaccccgatgcatacatagtgggcgaaatatgggagctttctccgagatgggtgcagggaaacatgttcgactccctcatgaactacgctctcggaagagatatactccttgcttacgcaaggggagactggaatggagaaagaacgctggagcttttgggcagatactacgcaagctacggagaaaacgtcattgccatgggttttaatctggtaagctcccatgacacttcaagagtccttacagatttaggaggtggcaatttaggagacacaccaaagccagaagcaattcagagactaaaacttctttcaacgctcttatacactcttccaggcatgcccgtaactttccaaggagatgaaagaggcctcctaggggacaaagaacactttgactcccatagatacccaatacaatgggataccgtgaatgaagatgtgttaaaccattacaagagcctcgcagatttaagaaaaagcgttccggcgttaacaagcagcaaaataaagttctacacctcaaaagaaggcgtcctagcatttttcaggggacatgatgacgaggttcttgtaattgcaaacaacgtccccaaagacacatctattccccttcctccaggcaaatggaagcagatatggccagaaggagagaaaatatttgagaaagagataacagttccagggctggaagttctggtactcgtaaagacatag

SEQ ID NO: 398 - protein, 726 aa, Thermococcus sp
MRRRFGALLLLMFMLNIIASGCLQSPTTQELKLPSGNYPPIYINEKSQNMCPPGKVPVTFRYQPEENVTSVSLRGSFNDWGELPMKNENGTWVRTVCLNPGRYEYKFFVDGEWIKDMSAVDPTADAYVDDGFGGKNAVKIVKGEQGLIIEHDPKNPAYLSIADNRTVIRFKVQPNQIQSAFLVASNGEYKMERQLWWGSGEVWRVEIQEVSPIEYYFKLTTNNGEVLVLNTSKNPFFTFDGINRFPQVEWVSKGIGYQIFPDRFNNGDPSNDALALQTDEFWFNELINERPILSNWSDPISPLHCCHQYFGGDIKGILEKLDYLQELGVTVIYLNPIFLAGSAHGYDVYDHYRLDPQFGSEEDLKILIEEAHKRGIRIIFDFVPNHSGIGHWAFLDVASRGKKSPYWNWYFVQRWPFKLGDGKAYLGWWGLGSLPKLNTANPEVKEYLIGAALHWLDFGFDGIRIDAPQELINAEEFFSELRKAIKEKHPDAYIVGEIWELSPRWVQGNMFDSLMNYALGRDILLAYARGDWNGERTLELLGRYYASYGENVIAMGFNLVSSHDTSRVLTDLGGGNLGDTPKPEAIQRLKLLSTLLYTLPGMPVTFQGDERGLLGDKEHFDSHRYPIQWDTVNEDVLNHYKSLADLRKSVPALTSSKIKFYTSKEGVLAFFRGHDDEVLVIANNVPKDTSIPLPPGKWKQIWPEGEKIFEKEITVPGLEVLVLVKT

SEQ ID NO: 399 - DNA, 2220 bp, Thermococcus sp
  CDS (1)..(2220): transl_table=11
atgagaagcagaaagatttatatgcttgttgtattgcttctttttttaggatttagtgaacaaatttcaacagtagctgcaggggtcagtccctcatatccagcaggggatccccagacatgggttatctaccaaatagtcattgatagattttacgatgggaacacctcaaacaatgatccattaaaaagtccaggattatatgatccaaacaaagagaactggaagctttattggggcggtgatttagagggcatcatagcaaagctgccctacttatatgaacttggagtgagtgccatatggatttctccagtgtttgataatatagatgttcctatcaatggaagcaatggtctagaggcggggtatcatgggtattggccaaaggactttaaggttatagaagagcactttgggacatgggaaatattccgcagacttagtcaagaagcagccaagtacaatatcacgattataattgacttcgttccaaaccacagcaatcccaatgatgcgggcgagtatggagctctatatgataatggcacgtttgttattgattatccaacggatgcaaattatgcgactgttcacccaataacaaagagtttatcgtacatatacaatcacaatggaggaataacaaattggaatgatagatgggaagtcagatataaaaatctctttaatctggctgatcttaatcagttgaatccatgggtggacaattatcttaaagaatcgacagtatcttacttagaagctggaattggaggaataagaatagatgcagttaaacacttagagcctggatggctcaaaacttatgcagactatgtatatgcaagaaagaacgtatttatgtttggagaatggtaccagggctttaacgatgagatgtactgggatatggttaagtttgcaaactatacggggataggccttattaacatcccactccaacaagttctcgttgatgtttttgcttatgatacaaagactatgtgggacttggaaagcgctgttaataaatataccattgactttatgtggcaaaataaactaactatattcgtagacagccacgatgttccaagatttctgtccttgagaaatgacttaataagatttcaccaagctcttgcttttgttctaaccgctcctggaattccaataatctattacggtgatgaacaatatcttcacaatgatactgtaaatgactttggtcaagttggaggtgacccatataatagacctatgatgaaaacttggaacacatcaacaaccgcttttaaactaataaagactctcgcaagtctgagacgctataatcctgctttagcttatggattgatcgcgacaaggtatgtaagcgatgacatttacatctttgaaagaaagttctttgataacgttgttctcgtagcaataaatcgcaatttaaattctccatatgtggtctctaacgtttacacctccctaccagatggaagttacaatgactaccttggaggacttttgaacggagttggaataacggtttcatctggtacattctctgtagagttacctgcaggttcagtatcagtatggcagtacaaagcaacgccgactgatccatgggtaggagcaattgatccagttatgggaagagctggaaacattgtcacagttagtggagaagggtttggggatgttccgggaagagtcttaataacaaatggacaagattactggactgcagaagttacatattggagcgataaaagcgtagagttcatagttccttcaggaataactacccaactaaacgaaaatcatgttgaagtcagaattgaaagggctgatggggctacatcaaatggaatagcctttgaatatctaacgaacaaacaaattccagctatttttgaagttaggaacactcaaggtacaaatttagaaacccaagttggagaatttttatggctaacaggtagtgttccagagttgagctattggagtccagaaacaataaaagctgttggaccaatgttgtgtccaggatggcctgattggtttgttgtagcaagtgtcccggcggatacctatatagagttcaagttcttaaaggcaccgcttggaggcactggaatctgggaagtaggaagcaatcacgcatacctaacaccttcaagcggaataggggaagtttcagttgaagccaaccgttga

SEQ ID NO: 400 - protein, 739 aa, Thermococcus sp
MRSRKIYMLVVLLLFLGFSEQISTVAAGVSPSYPAGDPQTWVIYQIVIDRFYDGNTSNNDPLKSPGLYDPNKENWKLYWGGDLEGIIAKLPYLYELGVSAIWISPVFDNIDVPINGSNGLEAGYHGYWPKDFKVIEEHFGTWEIFRRLSQEAAKYNITIIIDFVPNHSNPNDAGEYGALYDNGTFVIDYPTDANYATVHPITKSLSYIYNHNGGITNWNDRWEVRYKNLFNLADLNQLNPWVDNYLKESTVSYLEAGIGGIRIDAVKHLEPGWLKTYADYVYARKNVFMFGEWYQGFNDEMYWDMVKFANYTGIGLINIPLQQVLVDVFAYDTKTMWDLESAVNKYTIDFMWQNKLTIFVDSHDVPRFLSLRNDLIRFHQALAFVLTAPGIPIIYYGDEQYLHNDTVNDFGQVGGDPYNRPMMKTWNTSTTAFKLIKTLASLRRYNPALAYGLIATRYVSDDIYIFERKFFDNVVLVAINRNLNSPYVVSNVYTSLPDGSYNDYLGGLLNGVGITVSSGTFSVELPAGSVSVWQYKATPTDPWVGAIDPVMGRAGNIVTVSGEGFGDVPGRVLITNGQDYWTAEVTYWSDKSVEFIVPSGITTQLNENHVEVRIERADGATSNGIAFEYLTNKQIPAIFEVRNTQGTNLETQVGEFLWLTGSVPELSYWSPETIKAVGPMLCPGWPDWFVVASVPADTYIEFKFLKAPLGGTGIWEVGSNHAYLTPSSGIGEVSVEANR

SEQ ID NO: 401 - DNA, 1737 bp, Alicyclobacillus acidocaldarius
  CDS (1)..(1737): transl_table=11
atggaacttgtgtggcagcatcgttgggcggcagacgcttacccgcttgacttgtcaaccatggttcttgtgttgcgcgttgcgcgatgcacacccgcacagcgggtgcgggtgcactttggagatcggtacgaacctgactttcagaattcaagtgaggctcgaagatacggatcggacggaacatttgactggtttacgtgtcgagttgccgcaccgacgcgaagactgaagtatgcatttgaagtgttatcctcaactggacgggctgtgtacctgggtgagggcgggctcgcggatacattggatgctgtccagccctttcaatatccgtacattcatccatctcgggttctcgctgtcccagattgggtggggcatgcggtggcttatcaaatatttcctgatcggtttgctgtgggtgaacaacagttggtacgtccgacggatccatgggacgcgcgtccaacccctgatagtgtatttggtgggaacctgcgagggattgtggacaaactcccgtatctgagcgatctcggcgtgaacctgatgtacctcacgcctatcttccaggctccatcgaaccacaaatacgacacgcaggactattttgccgtagaccccgcattcggtaccttgggcgatctgcaattgctcgtacgagaagctcatcgcctcgggattcgcgtggttctcgacgcagtgttcaaccattcggggtttcaatttgccccctttcaggacgtcattgcgcgcggtacggcgtctccctattggtcttggttcttcgtgcaaggggaccgcgttgacgtcgaatccgtcaattatgagactttcgcaacgcgcctcagacatatgccaaaactgaacttggcagagcctgctgccgaagaatactttctgcaagtggccaaacactatgttctcgagtgcgatatcgacggatggcgttttgacgtcgccaacgaaatcgatccccacttttggtcacggttgcgatcagaactgcgcgccttgaaacctgatatcttgttgataggagaaatatggcatgacagcctcccttggctgatgggcgatgccttcgatggcgtgatgaattatccgcttcgagagcttgtcatgcgctatgccatggacgaatccatagatgaacctgctttcgcagaagcgtgggtacgcctctatctgcagtacccgcgtccggcatggcgcgcgatgtggaatctgttgggcagtcatgatactgaacgcgcgcttacgcgcgcacgcggtcatgttccctctgttgtgttggcgtttgcaatgcttttcacgctacccggaattcccatggtgtattatggggacgagatcggcatggaaggtggaaccgatccggattgccgtcggggcatgatctgggacgcgaacttatggcagcttgatcttcgcgaagccgtgcggcaactcgcatggctcaagcgaacccatcccgcgcttgcaggagatacaatggagattcgcgatgcgaactctggcgtgctgcattatgtacggctaaacggcacaggtccgcatcttcacattgctgtttgcaaacgtcgagacttcggcgcggaagtggactccccactattcgcgtgggatgtgccatctcggacatcgggcgaggaacgaaagatcctgatatgggaatgcgattcaactgaggggtgtgggcatgattcacgagcagacggatttcacaaccagtga

SEQ ID NO: 402 - protein, 578 aa, Alicyclobacillus acidocaldarius
MELVWQHRWAADAYPLDLSTMVLVLRVARCTPAQRVRVHFGDRYEPDFQNSSEARRYGSDGTFDWFTCRVAAPTRRLKYAFEVLSSTGRAVYLGEGGLADTLDAVQPFQYPYIHPSRVLAVPDWVGHAVAYQIFPDRFAVGEQQLVRPTDPWDARPTPDSVFGGNLRGIVDKLPYLSDLGVNLMYLTPIFQAPSNHKYDTQDYFAVDPAFGTLGDLQLLVREAHRLGIRVVLDAVFNHSGFQFAPFQDVIARGTASPYWSWFFVQGDRVDVESVNYETFATRLRHMPKLNLAEPAAEEYFLQVAKHYVLECDIDGWRFDVANEIDPHFWSRLRSELRALKPDILLIGEIWHDSLPWLMGDAFDGVMNYPLRELVMRYAMDESIDEPAFAEAWVRLYLQYPRPAWRAMWNLLGSHDTERALTRARGHVPSVVLAFAMLFTLPGIPMVYYGDEIGMEGGTDPDCRRGMIWDANLWQLDLREAVRQLAWLKRTHPALAGDTMEIRDANSGVLHYVRLNGTGPHLHIAVCKRRDFGAEVDSPLFAWDVPSRTSGEERKILIWECDSTEGCGHDSRADGFHNQ

SEQ ID NO: 403 - DNA, 1548 bp, Paenibacillus polymyxa
  CDS (1)..(1548): transl_table=11
atgctcacgatgttcgcctcaagtgcaatggccgagcaggatatgaacgggcataagcctccgaattctgctggaagcggcgtgttttacgaaatttatatcaattctttttatgattcgaacggggacggacatggtgatttaaaaggtattacgcaaaagcttgattacttaaacgacggcaatccccgttcgggtaaggatttgcaggtcagcggcctctggctcatgccactgaatccgtctccaagctaccataaatatgatgtaactgactactatcaagtggacccgcagtacgggaatctgaatgatttccgcaccttgacgaaagaagcaaaaagaaaaggtgtcaaggtgatcattgaccttgttatcaatcattcaagtagcgagcacccttggttcaaggaggctagtgccaacccgcaaagcaaataccatgactattacgtatgggctgatgagaatacaaacctggatgaaaagggatcatggggccagcaggtatggcataagaatccgaatggcgaagggtatttttacggtaccttctggtccgggatgccggatctgaattttgataatcccaaagtccgcaaggaaatgatcaaagtcggtaagtattggctacagcaaggtgcagacggcttccggcttgatgcggcgatgcatatttttaaagggcaaacgaaggacggtgccgataaaaacattacgtggtggaatgaattccgttccgagatggaaaagataaatccaaacgtatatctggcaggagaggtatgggataaaccggagacaatagctccttattacgaatcgctccactctctgtttaattttgacctgggcggaacgatattgaactctgtgaaaaacggtcgagatcaaggtattgctacattctccgagaaaacgctgaagctgtacaaatcatacaataaggcggcactcgatgctccatttttaagcaatcatgaccaaacccgagttatgagcgagctgggcggggatgtacgaaaagccaagctggctgcatccattcttttgacgttgccgggtcagccgtttctctattatggggaagagatcggcatgaagggagagaagcccgatgagtatcttcgagagcctatgcgctggtacaagggagaaggcctcggtcaaacaaagtgggaggaacccaaatacaacaaaggcgaagtatcggtggaagcgcagttgcgggacaatgattctctgctggaaagctaccgcacgcttatccgtctgagggaagaacatgaggctcttcgcagcgacagtctagagccgatccaagcaggttctgccagcgtgacggcatacgaacgttcttcaggcaaagaaacattgtatgtatatcataatctgtcaggagagccggttaccatccagatgaaagatcgagataaggaaaagcggaaagtggttttctctacctcaaaggatgctaaagtaaggaaagaaacggtgacgattcccgcttacagttctttaattacccaagaagatagaaagagctga

SEQ ID NO: 404 - protein, 515 aa, Paenibacillus polymyxa
MLTMFASSAMAEQDMNGHKPPNSAGSGVFYEIYINSFYDSNGDGHGDLKGITQKLDYLNDGNPRSGKDLQVSGLWLMPLNPSPSYHKYDVTDYYQVDPQYGNLNDFRTLTKEAKRKGVKVIIDLVINHSSSEHPWFKEASANPQSKYHDYYVWADENTNLDEKGSWGQQVWHKNPNGEGYFYGTFWSGMPDLNFDNPKVRKEMIKVGKYWLQQGADGFRLDAAMHIFKGQTKDGADKNITWWNEFRSEMEKINPNVYLAGEVWDKPETIAPYYESLHSLFNFDLGGTILNSVKNGRDQGIATFSEKTLKLYKSYNKAALDAPFLSNHDQTRVMSELGGDVRKAKLAASILLTLPGQPFLYYGEEIGMKGEKPDEYLREPMRWYKGEGLGQTKWEEPKYNKGEVSVEAQLRDNDSLLESYRTLIRLREEHEALRSDSLEPIQAGSASVTAYERSSGKETLYVYHNLSGEPVTIQMKDRDKEKRKVVFSTSKDAKVRKETVTIPAYSSLITQEDRKS

SEQ ID NO: 405 - DNA, 1689 bp, Dictyoglomus thermophilum
  CDS (1)..(1689): transl_table=11
atgatatacgatgacaaaatattcggagatttatgccacaaagagtttttagtagaaagagaagttaaaaaacttgaagaaatatatttagaagaggttttaccagaagatcctaagcctgaagatgaaatagaatttacttttaactgtccattaaagtttcacattacttcaggaaaaattgtcaaagataacagagaaatatatacctttaatatacaggaaagaaaaactcaatggaatgatagcatatttaactttagcgaaattatcaaaataaaaatacctcctttaaaggaaaatggtctatatcaaatccacctttatgagatgaatgaaaaaatctatgagcaatatctctcaatagacagttttgaagcacccttatggagtgaggagagtataatttatcacatatttattgatagatttgctaaagatgaaaaagaagtagaatattctgaaaacctcaaagagaaattaggaggaaacctgaaggggatactaagccgtttggattatatagaaaaccttgggataaataccatatggatatctcccatttttaaaagcacatcatatcatggttatgatattgaggattactttgaaattgatcctatttggggaacaaaagaagatttaaaaaaacttgtaagggaagccttcaatagaggcataagaataatcttagactttgtaccaaatcatatgtcatataaaaatcctatatttcagaaagctttaaaagacaaaaacagtaatctaagaagttggtttatatttaaaggagaagattatgaaacctttttcggtgtaaagtcaatgcccaaaataaaccttaaaaataaggaagcgatagattatataataaatgctgccaaatactggataagagaatttggaatttctggatatagaatggatcatgctacaggtcctgacattaatttttggagtattttttattataatttgaaatctgaatttccagaaactttctattttggagagatagtagagactccgaaagaaacaaaaaaatatgtaggcaaatttgacggaactttagatttttatctttttaaaataattagagacttttttataggtaaaagatggtctaccaaagagtttgtaaaaatgatcgatttggaagaaaaattctatggaaataaattcaagagaatttcttttctcgaaaatcacgattcaaatagatttctatgggttgctaaagataagaaattacttagattagcttcaattttccaattctcgattaatgcaatacctataatctacaatggacaagaaatgggatgtagtcagtacagagatatacttgagggaaatagaactctacacgaacatgcaagacttcctataccctggagtgatgacaaacaagacaaagaacttatagatttttacaggcaattagttaaaatcagaaaaagtcatccagcgctttacaaaggtacgtttattcctatattttcagatatgatatcttttatcaaagaaacccaagaagaatccatacttgtacttataaatatagaggataaagaagaaatctttaatctgaacggtacgtacagagatctatttagcggaaatatttacactaattctttaaagctaggcccgatgagtgctcacttattacttcgtatagatcactga

SEQ ID NO: 406 - protein, 562 aa, Dictyoglomus thermophilum
MIYDDKIFGDLCHKEFLVEREVKKLEEIYLEEVLPEDPKPEDEIEFTFNCPLKFHITSGKIVKDNREIYTFNIQERKTQWNDSIFNFSEIIKIKIPPLKENGLYQIHLYEMNEKIYEQYLSIDSFEAPLWSEESIIYHIFIDRFAKDEKEVEYSENLKEKLGGNLKGILSRLDYIENLGINTIWISPIFKSTSYHGYDIEDYFEIDPIWGTKEDLKKLVREAFNRGIRIILDFVPNHMSYKNPIFQKALKDKNSNLRSWFIFKGEDYETFFGVKSMPKINLKNKEAIDYIINAAKYWIREFGISGYRMDHATGPDINFWSIFYYNLKSEFPETFYFGEIVETPKETKKYVGKFDGTLDFYLFKIIRDFFIGKRWSTKEFVKMIDLEEKFYGNKFKRISFLENHDSNRFLWVAKDKKLLRLASIFQFSINAIPIIYNGQEMGCSQYRDILEGNRTLHEHARLPIPWSDDKQDKELIDFYRQLVKIRKSHPALYKGTFIPIFSDMISFIKETQEESILVLINIEDKEEIFNLNGTYRDLFSGNIYTNSLKLGPMSAHLLLRIDH

SEQ ID NO: 407 - DNA, 1497 bp, Dictyoglomus thermophilum
  CDS (1)..(1497): transl_table=11
atgaagataaagttttttatcaaaagaactcttattttcatattcatcttagttacttttctaacttatattcatggatataatgagccatggtataaaaacgcgattttttatgaagtctttgtaagatcttttgcagatagcgacggggatagagtaggagatttaaatggacttatagacaaattagattactttaaaaatctaaatattactgctctatggctaatgcctatcttcccctcagtgagttatcatggatatgatgtcacagactattatgatatccatccaggttatggtaccatggaggactttgaaaacctaataagaaaagcccatgaaaaaaatattaaaataattcttgatttggtagtaaaccacacctcttcaaggcatccatggtttgtttcttctgcctcttcttacaattctccgtatcgcgattattatatatggagtactgaaaaacctgaaaaaaattctaatttatggtataaaaaacctacaggatactactatgcattattctggtcagaaatgcccgatctaaactttgataatccaaaagtaagagaagaggtcaaaaaaattgcaaaattttggatagaaaaaggtgttgacggatttagactcgacgcagcaaagcatatttatgatgatgactctaaaaacattcagtggtggaaagaattttactcatatttaaagagtataaaacccgatgtataccttgttggtgaagtttgggataacgagtataagatagcagaatactataaaggattaccctcaaactttaattttcctctttctgacaaaataatgaactccagtagcaaatcaaaaagacttaggaattatagaatttctcgattgaagagactttttggggaaaacaatacagactttgctgatgccatatttttaagaaaccacgatcaagtaagagttaggacattctttggtggaagcatagataaaagtattttggcaggatctatttacttaactttggccgggaataccttcatatactacggagaagaaataggaatggaaggatcaaaacctgacgaatatataagagaaccgtttaagtggactgacgatatgaaatctaaataccaaacctattggattattccacgatataacttaccaggaaatggtatagccctcgataccgaagaaaaagatccaaatagcatatacaatcactataaaaaactcttagaaataagagtcaaatgcagagctttatctaatggaaaaatagagagaataaagactcaagatagatctatacttgcctataagttagaattagaggatgaaaaaataatggtagtccacaatctaaataggattgaaaatacctttaactttaacaacgagataaaagaaaaagacatactatatattagaaacgctaaaactgaaaaaaataaaataatcttaggaccttatagcactgttatagtcaaaatcccataa

SEQ ID NO: 408 - protein, 498 aa, Dictyoglomus thermophilum
MKIKFFIKRTLIFIFILVTFLTYIHGYNEPWYKNAIFYEVFVRSFADSDGDRVGDLNGLIDKLDYFKNLNITALWLMPIFPSVSYHGYDVTDYYDIHPGYGTMEDFENLIRKAHEKNIKIILDLVVNHTSSRHPWFVSSASSYNSPYRDYYIWSTEKPEKNSNLWYKKPTGYYYALFWSEMPDLNFDNPKVREEVKKIAKFWIEKGVDGFRLDAAKHIYDDDSKNIQWWKEFYSYLKSIKPDVYLVGEVWDNEYKIAEYYKGLPSNFNFPLSDKIMNSSSKSKRLRNYRISRLKRLFGENNTDFADAIFLRNHDQVRVRTFFGGSIDKSILAGSIYLTLAGNTFIYYGEEIGMEGSKPDEYIREPFKWTDDMKSKYQTYWIIPRYNLPGNGIALDTEEKDPNSIYNHYKKLLEIRVKCRALSNGKIERIKTQDRSILAYKLELEDEKIMVVHNLNRIENTFNFNNEIKEKDILYIRNAKTEKNKIILGPYSTVIVKIP

SEQ ID NO: 409 - DNA, 1242 bp, Triticum aestivum
  CDS (1)..(1242)
atgggcaagcactctgctactctctgtggccttctggttgttgtgctttgtctcgcctccagcttagcacaggctcaaattcttttccaggggtttaattgggaatcgtggaagacacaaggcgggtggtacaagttcatgcaagggaaggtggaggagatcgccagcaccggcgccacccacgtctggctccccccgccgtcgcaatccgtgtcgccggagggctatctgccggggcagctctacaacctcaactccaagtacggcagcggggccgacctcaagtcgctgatccaggcgttccgcggcaagaacatctcgtgcgtcgccgacatcgtcatcaaccaccgctgcgccgacaagaaggacggccgcggcgtctactgcatcttcgagggcgggacgtccgacaaccgcctcgactggggccccgacgagatctgcagcgacgacaccaagtactccaacggccgcggccacagggacaccggcggtggcttcgacgccgcgcccgacatcgaccacctcaacccgcgggtccagagggagctctccgcctggctcaactggctcaaaaccgacctcggcttcgacggatggcgcctcgacttcgccaagggatactccgcggccatggccaagatctacgtcgacaacagcaagccggcgttcgtcgttggcgagctctacgaccgggaccgacagctgctcgcgaactgggtgcggggcgtcggcgggccggccacggcgtttgacttccccaccaagggcgttctccaggaggccgtccagggcgatctggggaggatgcgcggcagcgacggcaaggcgcccggtatgattgggtggatgccggagaagaccgtcacgttcatcgacaaccacgacactgggtcgacgcagaggctgtggccattcccctcggacaaggtcatgcagggctacgcctacatcctcacacacccgggcataccatgcatcttctacgaccatgtgttcgactggaaactgaagcaggagatcaccgcactggctacggtcaggtcaaggaacgggatccatccgggtagcacactggatatcctcaaagccgagggcgatctctatgttgccaagattgggggcaaggttataaccaagatcgggtcaagatacaatattggcgacaatgtgatcccctcgggtttcaagattgcagctaaaggcaacaactattgtgtctgggagaagagcggcctctga

SEQ ID NO: 410 - protein, 413 aa, Triticum aestivum
MGKHSATLCGLLVVVLCLASSLAQAQILFQGFNWESWKTQGGWYKFMQGKVEEIASTGATHVWLPPPSQSVSPEGYLPGQLYNLNSKYGSGADLKSLIQAFRGKNISCVADIVINHRCADKKDGRGVYCIFEGGTSDNRLDWGPDEICSDDTKYSNGRGHRDTGGGFDAAPDIDHLNPRVQRELSAWLNWLKTDLGFDGWRLDFAKGYSAAMAKIYVDNSKPAFVVGELYDRDRQLLANWVRGVGGPATAFDFPTKGVLQEAVQGDLGRMRGSDGKAPGMIGWMPEKTVTFIDNHDTGSTQRLWPFPSDKVMQGYAYILTHPGIPCIFYDHVFDWKLKQEITALATVRSRNGIHPGSTLDILKAEGDLYVAKIGGKVITKIGSRYNIGDNVIPSGFKIAAKGNNYCVWEKSGL

SEQ ID NO: 411 - DNA, 1761 bp, Bacillus acidopullulyticus
  CDS (1)..(1761): transl_table=11
atgtttagagaagcaatttatcaccgtcctaaagataattatgcatatgcttgcgcaaatggagaattacatatcagaatcagaacgaaaaaagacgatatgaaagaggtaacacttgtttacggagacacttatgaatttgatgacaataaatggacctattcaacagcccatatgaaaaaaaccggctccgaccaattgtttgattactggctcgcttctgtcactccgcgatataagagattgcgctatgggtttattgtaaatgaccgcaaagactcgacctgttttactgaaaaagggttttacccggagcccccagtaaatgacatttcctattatttcagctttccttatgtgaatcaggccgatattttccaggcacccgaatgggtaaaggacaccgtctggtatcaaattttccctgaacgctttgccaatggaaacaaagacaacgaccctgatggcacccttccatggggcagccgtgaaccggaaattgacaacttttttggcggagatttggaaggagtcattgaacatattgactatctcaaagaattgggcattggcggtatatactttacccctatatttaaggcacactccaaccataaatacgatacgattgattacatggaaatagatccgcaattcgggacaaaagaaacattaaaaaaattgattgatgtctgccataaaaatggaataaaagtgatgcttgatgctgtgtttaatcatagcggtgttttttttccaccatttcaggatgtagtggaaaaaggtaagaattccaagtaccaagactggttccacatccgggagtttccactcgtaatggagccaaggccaaattatgataccttcggctttacgtcttccatgccaaagttcaagacagaaaaccctgaagtgaaggaatatttactagaggttggccggtattgggtaagggaatttgatattgacggctggcgtttagatgtggcaaatgaagtgagccacgccttttggcgtgaattccgcagggaagtgaaagccatcaagcccgacttgtatatccttggggaaatttggcacgactccttgccttggctgcggggtgatcaatttgatgctgtgatgaattatcctttatccactaatattgtaaatctttttgccaatcaatccgtttcggtaaaagagtttgtagaaaatatgtcccatgttatccatatgtatcctgacactgttaacgaagctgcgttcaaccttgttggcagccacgatacaccgagaatattaacacagtgcggagaggatgtagaacgcttaaagcaagtgtttgtcttattgttaacattcataggcaccccctgcatttattacggggatgaaatcggcttaaccggcggacaggatcccggctgccggaaatgcatggagtggaatccagaccaacaaaaccgtgaacttcttcagcacgtcaggaaattaatacaattacgcagcgaaaatcctttgctcgccaatgagggagagctgacttttgtcccaccgaaaaatgaggaagatccgtgtcttgcttatacaaaatccaatgaggaaaaaacgattatgattattataaataaaagtaaaaactcagtggagtacccactttcatttgacgcagctgaacaaacagtaaaaaatctttggaatcaggaacagttgattttacaaaatggccaaacactggaactgaaggcaaatgactttaaaatattagaattttaa

SEQ ID NO: 412 - protein, 586 aa, Bacillus acidopullulyticus
MFREAIYHRPKDNYAYACANGELHIRIRTKKDDMKEVTLVYGDTYEFDDNKWTYSTAHMKKTGSDQLFDYWLASVTPRYKRLRYGFIVNDRKDSTCFTEKGFYPEPPVNDISYYFSFPYVNQADIFQAPEWVKDTVWYQIFPERFANGNKDNDPDGTLPWGSREPEIDNFFGGDLEGVIEHIDYLKELGIGGIYFTPIFKAHSNHKYDTIDYMEIDPQFGTKETLKKLIDVCHKNGIKVMLDAVFNHSGVFFPPFQDVVEKGKNSKYQDWFHIREFPLVMEPRPNYDTFGFTSSMPKFKTENPEVKEYLLEVGRYWVREFDIDGWRLDVANEVSHAFWREFRREVKAIKPDLYILGEIWHDSLPWLRGDQFDAVMNYPLSTNIVNLFANQSVSVKEFVENMSHVIHMYPDTVNEAAFNLVGSHDTPRILTQCGEDVERLKQVFVLLLTFIGTPCIYYGDEIGLTGGQDPGCRKCMEWNPDQQNRELLQHVRKLIQLRSENPLLANEGELTFVPPKNEEDPCLAYTKSNEEKTIMIIINKSKNSVEYPLSFDAAEQTVKNLWNQEQLILQNGQTLELKANDFKILEF

SEQ ID NO: 413 - DNA, 1563 bp, Bacillus megaterium
  CDS (1)..(1563): transl_table=11
atgaaagggaaaaaatggacagctttagctctaacactgccgctggctgctagcttatcaacaggtgttgacgccgaaaccgtacataaaggtaaagctccaacagcagataaaaacggtgtcttttatgaggtatatgtaaactctttttacgatgcaaataaagatggacatggtgatttaaaaggccttacacaaaagttggactatttaaatgacggaaattctcatacaaagaatgatcttcaagtaaacgggatttggatgatgccggtcaacccttctcctagctatcataaatatgatgtaacggactattataatattgatccgcagtatggaaatctgcaagattttcgcaaacttatgaaagaagcagataaacgagacgtaaaagtcattatggaccttgttgtgaatcatacgagcagtgaacacccttggtttcaagctgcgttgaaagataaaaacagcaagtacagagattactatatttgggctgataaaaatactgacttgaatgaaaaaggatcttggggacaacaagtatggcataaagctccaaacggagagtatttttacggaacgttctgggaaggaatgcctgacttaaattacgataaccctgaagtaagaaaagaaatgattaacgtcggaaagttttggctaaaacaaggcgttgacggcttccgcttagatgctgcccttcatatttttaaaggtcaaacgcctgaaggcgctaagaaaaacattctatggtggaatgagtttagagatgcgatgaaaaaagaaaacccgaacgtatatctaacgggtgaagtgtgggaccagccagaagtagtagccccttactatcaatcacttgattctctatttaattttgatttagcaggaaaaattgtcagctctgtaaaagcaggaaatgatcaaggaatcgccactgcagcagcggcaactgatgagctgttcaaatcatacaatccaaataaaattgacggcattttcttaaccaaccatgaccaaaatcgcgtcatgagtgagttaagcggcgatgtgaataaagcaaaatcagccgcctctatcttacttacgcttcctggaaatccgtatatttattacggtgaagaaattggcatgacaggtgaaaagcctgatgaattaatccgtgaaccgttccgctggtacgaaggcaacggaattggacaaactagctgggaaacacctgtatataacaaaggcggtaacggcgtgtctgtagaagcacaaacaaaacaaaaggattccttgttaaatcattaccgtgaaatgattcgtgtgcgccagcagcacgaagagttagtaaaaggaacgcttcaatccatttcagtagacagtaaagaagtcgttgcctatagccgcacgtacaaaggcaaatcgattagcgtgtatcataatatttcaaatcaacctgtaaaagtatctgtagcagcgaaaggtaacttgatttttgctagtgaaaaaggtgctaagaaagtcaaaaatcagcttgtgattccggcgaatcggacggttttaataaaataa

SEQ ID NO: 414 - protein, 520 aa, Bacillus megaterium
MKGKKWTALALTLPLAASLSTGVDAETVHKGKAPTADKNGVFYEVYVNSFYDANKDGHGDLKGLTQKLDYLNDGNSHTKNDLQVNGIWMMPVNPSPSYHKYDVTDYYNIDPQYGNLQDFRKLMKEADKRDVKVIMDLVVNHTSSEHPWFQAALKDKNSKYRDYYIWADKNTDLNEKGSWGQQVWHKAPNGEYFYGTFWEGMPDLNYDNPEVRKEMINVGKFWLKQGVDGFRLDAALHIFKGQTPEGAKKNILWWNEFRDAMKKENPNVYLTGEVWDQPEVVAPYYQSLDSLFNFDLAGKIVSSVKAGNDQGIATAAAATDELFKSYNPNKIDGIFLTNHDQNRVMSELSGDVNKAKSAASILLTLPGNPYIYYGEEIGMTGEKPDELIREPFRWYEGNGIGQTSWETPVYNKGGNGVSVEAQTKQKDSLLNHYREMIRVRQQHEELVKGTLQSISVDSKEVVAYSRTYKGKSISVYHNISNQPVKVSVAAKGNLIFASEKGAKKVKNQLVIPANRTVLIK

SEQ ID NO: 415 - DNA, 4428 bp, Thermoanaerobacter thermohydrosulfuricus
  CDS (1)..(4428): transl_table=11
gtgtttaaaaggagagctttaggatttttgctggcttttcttttagtttttacagcagtatttggctcaatgcctatggaatttgcaaaggctgagacagatacagcgccagcgatagccaatgttgttggcaattttcaatccaaacttggagattctgactggaatataaacagtgacaaaacgataatgacatataaaggtaatggcttttatgaatttactaccccagttgcgttacctgcaggtgattatgagtataaagttgctcttaatcattcatgggaaggtggaggagttccttcacaaggtaatttaagctttcatcttgattcagattctgtagtgactttttattacaattacaacacttcaagtattaccgattccacaaaatatacaccaattcccgaagacaagcttccaagacttgtagggactatacagcctgcaataggagcaggtgatgattggaaacctgaaacatcgactgctataatgagagactataagtttaataatgtttacgaatacactgcaaatgttccaaaagggaattatgagtttaaagtgactttagggccctcatgggatataaattatggcttaaatggtgaacaaaatgggccaaatattcctttgaatgtagcctatgatactaagattacattttactatgattcggtttcacataatatatggacagattataatccacctcttacaggacctgataataacatatattatgacgatttaagacatgacacccatgacccattcttccgctcgcctttcggtgcaataaaaacgggagatactgtgacattaagaatacaagcaaaaaatcatgacattgagtcagctaaaatttcttattgggatgatattaaaaaaacaagaatagaagtccctatgtacagaattggtcaaagtcctgacgggaaatatgaatactgggaagttaagttaagctttgaccatcccacaagaatttggtattactttatacttaaagacgggaccaaaactgcttattacggagataacgatgaacaattaggtggcgtaggtaaagccacagatacagaaaataaggacttcgaacttactgtctacgataaaaacttagacacccctgattggatgaaagggtcagtaatgtatcaaatattccctgataggttctttaatggggattcttcaaatgaccatctaaagaaatacagcagaggttttgatcctgttgaatatcatagcaactggtacgagcttccagataatccgaatgataaaaataaactaggatatacaggggatggcatatggtcaaatgacttctttggcggtgatttaaaaggtatagatgataaattggattatttaaaaagccttggaatatcagtcatttatctcaatccaatttttcaatcaccttctaatcacaggtacgatacaaccgattacacaaaaatagacgaactattaggagatttatctacctttaagaagctcatggaggatgcccatgcaaaagggattaaggtaatacttgatggcgtcttcaatcatacaagtgatgacagcatttattttgatagatatggtaaatacttaaacacgggagttttaggtgcttatcaagcatggaaacagggagatcagtcaaagtctccatatggtgactggtatgagataaagcctgacggtacctatgaaggatggtggggatttgacagtttacctgtgataaggcagataaacggcagtgaatataatgtcaaaagttgggcggattttattataaataatcctaatgcaatatctaagtattggttaaatcctgatggggacaaaaatgtaggtgcagatggttggagattagatgttgcgaatgaagttgctcacgatttttgggttcattttagaggtgcaattaatactgtgaaaccgaatgctccgatggttgcagaaaactggaatgacgcttcactggatctgcttggagattcttttaactctgttatgaattatctctttagaaatgcagtaattgactttatattggataaatcatttgatgacggaaatgtggttcacaatcctatagatgcagcaaaactcgaccaaaggcttatgagcatatatgagagatatcctcttccagtgttttattctactatgaatcttttaggttctcatgacaccatgaggatattgacagtatttggatacaactctgcggatgaaaatcaaaattctcaagcagcaaaagaccttgcggttaaaagacttaaacttgctgcaatactgcaaatgggttatccaggcatgccttctatttattacggagatgaagcaggacaatctggcggaaaagacccggacaacagaaggacattcccttggggaagagaagatactgatttgcaaacttttttcaagaaagttgtaaatataagaaatgagaatcaagttttgaaaacaggagaccttgagacactttatgcaaatggcgatgtttatgcctttggaagaagaatcataaatggaaaagatacttttgggaaatcgtatcctgacagtgtagctattgtcgtaataaataaaggtgacgcaaaacaggtttctatagataccactaaatttataagagatggagttgcttttacagatgccttaagtggcaagacatacacggttcaggatggtaaaattgttgtagaagttggatcaatggatggagctatacttatatcagatacaggacaaaatttgacagcacctcagccaataacagaccttaaagcagtctcagggaatggcaaagtagacctttcctggagtgtagtagataaagcagtaagctataatatttaccgttctacagttaaaggtgggttatatgaaaaaatagcttcaaatgttacgcaaattacctatactgatacagaggttaccaatggtctaaagtatgtgtatgctgtaaccgctgtagataatgatggaaatgagagtgctttaagcaatgaagttgaggcatatccagcatttcctattggctgggcgggaaatatgaatcaagtaaatacacatgtaataggtgtaaataatccagttgaagtgtatgctgaagtgtgggctcaagggcttacagataaacctggccaaggagaaaatatgattgcccagttaggatataggtatattggagatactgtaggagatgcagtttacaatgccgtgtacaataaggtagaaggtgttgaaataagtaaggactggacatgggttgatgcacaatatgtaggtgattctggaaataatgataaatacatggctaaatttgtacctgatatggtaggcacatgggaatacattatgagattttcttctaaccaaggccatgattggacgtatacaaaaggaccagatgggaaaacagatgaagcaaaacagtttactgtcgtgccatcaaatgatgtagaaacacctacagctccagtcttacaacaaccaggaattgaatcctcaagagttacacttaactggagtccgtcagctgatgatgttgctattttcggctacgaaatctataagtcttcaagtgagacaggaccatttataaagattgcaactgtgtctgacagtgtgtataactacgtagatacagatgtagtaaatggcaatgtgtattattataaagttgtggcagttgatacctcctataataggacagcatcaaatacagtaaaagcgacacctgatataatacctataaaagtgacatttaatgtcacaataccagattatactcctgatgatggtgtaaatattgctggaaacttcccggatgctttctggaatccaaatgctaatcaaatgacaaaagctggttctaacacctatagtattacacttactttaaatgagggtacacaaattgaatataaatatgcaagggggagctgggataaagtagaaaaaggtgaatacggcaatgagattgacaacagaaaaataactgttgtcaatcagggttcaaatacaatggttgtaaatgatacagtgcaaagatggagagatgtgccaatatatatctattctccaaaagacaagactattgttgatgcaaatacgagtgaaatagagattaaaggcaatacttacaaaggtgcgaaagtaactataaatgatgaatcttttgtgcaacaagaaaatggagtatttacaaaagtagttcccttggaatatggtgtaaatactatcaaaatacatgtagagccaagtggtgacaagaataatgaacttacaaaagatataacaataactgttacaagagagaagccggccaggagacagaacctactcctactccaccaacagaaacaacaaaaccatctcaagaagtatcacaaggcaaaatag

SEQ ID NO: 416 - protein, 1475 aa, Thermoanaerobacter thermohydrosulfuricus
MFKRRALGFLLAFLLVFTAVFGSMPMEFAKAETDTAPAIANVVGNFQSKLGDSDWNINSDKTIMTYKGNGFYEFTTPVALPAGDYEYKVALNHSWEGGGVPSQGNLSFHLDSDSVVTFYYNYNTSSITDSTKYTPIPEDKLPRLVGTIQPAIGAGDDWKPETSTAIMRDYKFNNVYEYTANVPKGNYEFKVTLGPSWDINYGLNGEQNGPNIPLNVAYDTKITFYYDSVSHNIWTDYNPPLTGPDNNIYYDDLRHDTHDPFFRSPFGAIKTGDTVTLRIQAKNHDIESAKISYWDDIKKTRIEVPMYRIGQSPDGKYEYWEVKLSFDHPTRIWYYFILKDGTKTAYYGDNDEQLGGVGKATDTENKDFELTVYDKNLDTPDWMKGSVMYQIFPDRFFNGDSSNDHLKKYSRGFDPVEYHSNWYELPDNPNDKNKLGYTGDGIWSNDFFGGDLKGIDDKLDYLKSLGISVIYLNPIFQSPSNHRYDTTDYTKIDELLGDLSTFKKLMEDAHAKGIKVILDGVFNHTSDDSIYFDRYGKYLNTGVLGAYQAWKQGDQSKSPYGDWYEIKPDGTYEGWWGFDSLPVIRQINGSEYNVKSWADFIINNPNAISKYWLNPDGDKNVGADGWRLDVANEVAHDFWVHFRGAINTVKPNAPMVAENWNDASLDLLGDSFNSVMNYLFRNAVIDFILDKSFDDGNVVHNPIDAAKLDQRLMSIYERYPLPVFYSTMNLLGSHDTMRILTVFGYNSADENQNSQAAKDLAVKRLKLAAILQMGYPGMPSIYYGDEAGQSGGKDPDNRRTFPWGREDTDLQTFFKKVVNIRNENQVLKTGDLETLYANGDVYAFGRRIINGKDTFGKSYPDSVAIVVINKGDAKQVSIDTTKFIRDGVAFTDALSGKTYTVQDGKIVVEVGSMDGAILISDTGQNLTAPQPITDLKAVSGNGKVDLSWSVVDKAVSYNIYRSTVKGGLYEKIASNVTQITYTDTEVTNGLKYVYAVTAVDNDGNESALSNEVEAYPAFPIGWAGNMNQVNTHVIGVNNPVEVYAEVWAQGLTDKPGQGENMIAQLGYRYIGDTVGDAVYNAVYNKVEGVEISKDWTWVDAQYVGDSGNNDKYMAKFVPDMVGTWEYIMRFSSNQGHDWTYTKGPDGKTDEAKQFTVVPSNDVETPTAPVLQQPGIESSRVTLNWSPSADDVAIFGYEIYKSSSETGPFIKIATVSDSVYNYVDTDVVNGNVYYYKVVAVDTSYNRTASNTVKATPDIIPIKVTFNVTIPDYTPDDGVNIAGNFPDAFWNPNANQMTKAGSNTYSITLTLNEGTQIEYKYARGSWDKVEKGEYGNEIDNRKITVVNQGSNTMVVNDTVQRWRDVPIYIYSPKDKTIVDANTSEIEIKGNTYKGAKVTINDESFVQQENGVFTKVVPLEYGVNTIKIHVEPSGDKNNELTKDITITVTREKPARRQNLLLLHQQKQQNHLKKYHKAK

SEQ ID NO: 417 - DNA, 1776 bp, Bacillus sphaericus
  CDS (1)..(1776): transl_table=11
atgattatgctggaagccgtttaccaccggatgggacaaaactggtcctatgcctacaatgattcgaccttgcatatccgcatccgcaccaagcgggacaatgtcccgcgcatcgacctgcactgcggcgagaagtacgatccggagaagtacaaggaaaccattcccatggagcgtatggcttctgacggactgtttgattattggcaagccgccgtgcagcccagataccgtagattagtttattacttcgcgctgcattccgacaacggcgatgccgtttactttatggagaagggattctttgatcagccgcccaaggtgatgtatgaaggattgttcgacttcccttatctgaatcggcaggatgtgcacacgcctccggcatgggttaaggaagcgatattctatcagattttccccgagcgcttcgcgaacggcgatccgtccaacgatcccgaaggcgtgcaggaatggggaggtacgcccagcgccggcaatttcttcggcggggatttgcaaggcgtgatcgatcatctggactatctaagcgatctgggcgttaatgctttgtatttcaaccccctattcgcggccaccaccaaccataaatacgatacggcggactatatgaagatcgacccccaattcggcacgaacgaaaagctcaaggagctggtcgatgcctgccatgcccggggcatgcgcgtgctgctggacgccgtgttcaaccactgcggccatacgtttccgccgttcgtggacgtgttgaacaacggtctgaattcgcgttacgcggattggttccatgttcgggaatggcctctgcgggtcgttgacgggattccgacctacgatacgttcgcattcgaaccaatcatgcccaagctcaataccggcaatgaagaagtgaaggcttacctgttgaatgtcggccgttactggctggaggagatggggctggacggctggcggctggatgtcgccaatgaggtggaccatcaattctggcgggaattccggagcgagatcaaacggatcaatccttcggcctatatcttaggcgagattatgcatgattccatgccgtggctgcaaggcgaccaattcgacgcggtcatgaattatcccttcacgaacatcctgctgaacttcttcgcccgcaggctgacgaacgcggccgaattcgcccaggcgatcggcacgcagctcgccggttatccgcagcaggttacggaagtgtcattcaatctgctcggcagccatgacacgacgaggctattgacgttgtgcagcggcaatgtggagcgcatgaagctggcgaccttattccagctgacctatcaggggacgccatgcatctattacggcgacgagatcggcatggacggcgagtatgaccccctcaaccgcaagtgcatggaatgggacaagagcaagcagaatacggagctgcttgcgttcttccggagcatgatcagcctgcgcaaggctcaccctgcgctgcgcggaagcggactgcgcttcctgccggtgctggagcacccgcagttgctggtctatgagcgctgggacgataatgagcgattcctcatcatgctgaataatgaggatgctcccgtgaacgttgttatcccggcagctcagcccggcgcttcttggcgcaccgtgaacggcgagccatgcgcagtagtcgaggaaagttcgatacaggcggctctccctccttacggttatgccatactgcatgcgcctatagcaggaacggctgagtaa

SEQ ID NO: 418 - protein, 591 aa, Bacillus sphaericus
MIMLEAVYHRMGQNWSYAYNDSTLHIRIRTKRDNVPRIDLHCGEKYDPEKYKETIPMERMASDGLFDYWQAAVQPRYRRLVYYFALHSDNGDAVYFMEKGFFDQPPKVMYEGLFDFPYLNRQDVHTPPAWVKEAIFYQIFPERFANGDPSNDPEGVQEWGGTPSAGNFFGGDLQGVIDHLDYLSDLGVNALYFNPLFAATTNHKYDTADYMKIDPQFGTNEKLKELVDACHARGMRVLLDAVFNHCGHTFPPFVDVLNNGLNSRYADWFHVREWPLRVVDGIPTYDTFAFEPIMPKLNTGNEEVKAYLLNVGRYWLEEMGLDGWRLDVANEVDHQFWREFRSEIKRINPSAYILGEIMHDSMPWLQGDQFDAVMNYPFTNILLNFFARRLTNAAEFAQAIGTQLAGYPQQVTEVSFNLLGSHDTTRLLTLCSGNVERMKLATLFQLTYQGTPCIYYGDEIGMDGEYDPLNRKCMEWDKSKQNTELLAFFRSMISLRKAHPALRGSGLRFLPVLEHPQLLVYERWDDNERFLIMLNNEDAPVNVVIPAAQPGASWRTVNGEPCAVVEESSIQAALPPYGYAILHAPIAGTAE

SEQ ID NO: 419 - DNA, 1725 bp, Thermoanaerobacter ethanolicus
  CDS (1)..(1725): transl_table=11
atgataaaagaagctatattccataaaagcgatgtgccttacgcatatccactgaatgaaaatcaattaaagatagtactaaggactgctgtatttgatgtagatagggtgtatgttttatacaaagacagatacgattggctgggaaaattcaaaataaaaccaatggtattaactcataccaacgagttatttgattattatgagactactttagagcttaataaaaaatttgtgtattttttctatttggtatctgatgggggcgagaagttatattatacagaagcaggattttacaaaaaaaggccagaaaatcatttttggggatttttccattacccgtatataggagaaaaggatgtcttttttgctccagagtggacaagcgattgcatggtgtatcagatatttcctgaaaggtttaataacggtgataaatcaaatgaccctgaaaatgtaaagccctggggtgaaaaacctactgcagattctttctttggaggagatttgcaaggaataatagataaaatagattatttaaaggatttgggtataaatgccatttatttaacccccatatttttatcgcattccacccacaaatatgatactactgattattatacaattgacccccactttggtgatacgcaaaaagcgagagaacttgtgcaaaaatgtcatgacaatggcataaaagttatatttgatgccgtttttaatcactgcggatatgacttttttgcatttcaggatgttattaaaaatggtaaaaaatcaaaatactgggattggtttaatatatacgaatggccaattaaaactcatggaaaaccttcctatgaagcttttgcagatactgtatggagaatgccaaaacttatgacaaaaaatccagaagtacagaagtatttattggaagtagcggaatattggattaaagaagtggacatagacggctggaggctggatgttgctaatgagatagaccaccatttttggagaaagtttagagaagttgtaaaggcagctaaaccggaggccataattgtaggagaggtttggcatgatgcttctccttggcttagaggggatcagtttgacagtgtaatgaactatccttttagaaatgcggttgtggacttttttgcaaaaaggaaaataagtgcttctcgctttaatacaatgattacagagcaacttatgaggcatatggatagtgtaaatagggttatgtttaatttaataggaagtcatgatactgagaggtttttgactttagctaatggcatggttgcgagaatgaagttagcattagtgtttcaatttacctttgttggaatcccatatatttactatggggacgaggtaggaatggtgggagattatgaccctgattgcagaagatgcatgatatgggaggaggaaaagcaaaataaaagtatttttaatttctataaaaagttgatttctataaggagagaaaatgaggagctcaaatacggaagtttctgtactttatatgctataggaagagtgtttgcttttaagagggaatacaaaggtaaatcaataattgttgtactaaataacagtagcaagcaggaagtgatatttttgaatgaagtagaaggaaaagaagatattttaaagatgaaggaattaaaaagaagtggaaatctcctttacttgcaacctaactctgcctatattttaaagtaa

SEQ ID NO: 420 - protein, 574 aa, Thermoanaerobacter ethanolicus
MIKEAIFHKSDVPYAYPLNENQLKIVLRTAVFDVDRVYVLYKDRYDWLGKFKIKPMVLTHTNELFDYYETTLELNKKFVYFFYLVSDGGEKLYYTEAGFYKKRPENHFWGFFHYPYIGEKDVFFAPEWTSDCMVYQIFPERFNNGDKSNDPENVKPWGEKPTADSFFGGDLQGIIDKIDYLKDLGINAIYLTPIFLSHSTHKYDTTDYYTIDPHFGDTQKARELVQKCHDNGIKVIFDAVFNHCGYDFFAFQDVIKNGKKSKYWDWFNIYEWPIKTHGKPSYEAFADTVWRMPKLMTKNPEVQKYLLEVAEYWIKEVDIDGWRLDVANEIDHHFWRKFREVVKAAKPEAIIVGEVWHDASPWLRGDQFDSVMNYPFRNAVVDFFAKRKISASRFNTMITEQLMRHMDSVNRVMFNLIGSHDTERFLTLANGMVARMKLALVFQFTFVGIPYIYYGDEVGMVGDYDPDCRRCMIWEEEKQNKSIFNFYKKLISIRRENEELKYGSFCTLYAIGRVFAFKREYKGKSIIVVLNNSSKQEVIFLNEVEGKEDILKMKELKRSGNLLYLQPNSAYILK

SEQ ID NO: 421 - DNA, 1761 bp, Drosophila virilis
  CDS (1)..(1761)
atgagtttgaagtggagcttagttttgggcctaagttggctcctttttgtggcttcgtcagaattaaaaaagcataagccaaacgagttggacgacaatattaattggtggcgacacgaggtcttttatcagatttatcctaggtcctttaaggacagcgatggcgatggcattggtgatcttaagggcatcacctccaagctgcagtactttgtggacactggcatcacggccatctggctaagtcccatttacaagtcacccatggttgactttgggtacgatatatccgactacagggacatccagccggagtatggcaccctggaggactttgatgcgctgatcgccaaggccaatcaactgggcatcaaggtcattttggactttgtgcccaatcacagctcggacgaacacgaatggtttaagaagtccgctgctagagagcctggctatgaggatttctatgtgtgggaggacggcatacctggggataatgaaactcgcttaccgccaaacaactgggtatctgtattctccggctccgcttggcagtggcacgaggagcggcaacaattctatttgcgtcagtttaccaagggacagcccgatttgaactatcgtaatcctgctgtggtgcaggccatggatgaagttttgttgtactggctgcaaaagggcgtggctggcttccgcatcgatgccgttatctatatatatgaggacgaacagttgcgcgacgagcccttgagcggttccaccagtgatccgaactcagttgattatctggagcacatctacacaaggaacctgccggaatgctatggcctcattcagcattggcgtcagctgttggacaactacacggccgataatccgggaccagtgcgcattatgatgaccgagggctatgcggatctatcgctgctaatgaactactatgaagatgaggacggcgtgcagggcgcccactttccctttaattttgattttattaccgagctgaatgcaaactcagcggctccggactttgtatacttcattcaaagatggctgacctatatgccgcctggacactcagccaactgggtgatgggcaatcatgataatccgcgcgttgcatctcggtatggcgttggcactgtggatgccatgaacatgctgatgatgactttgccgggcatcggcattacctactatggcgaggaactcggcatggtagactatcgtgacattagctggaacgatacagtggatcagcccgcctgtgatgctggtcttgacaattacaagtgggtctctcgcgaccccgaacgcacgccaatgcagtggagtgatgagaagaatgctggtttctccacgggagattccacctggttgccagtgcacccgaattatcaggagcttaatctgctcacccagcaagaagccacttacagccattataaggtctatcagtcgctgatcaagctgagacaatcgcgagtcttgcgggatggctcatttacagcccaggcccttaatcgtaatgtttttgctattaagcgcgaattgagaggtcagcccaccctgctaactgtcattaatgtgagcaatcgcacccagcaagtcgatgtcagtaactttatcgatttgcccaatcgtcttacattgttggttgtgggcgtttgctcccagcatagggtgagcgagcgccttaagcccgccgaggtcaaactgtcgccccatgagggtctagttatacagctcaaagctcgctag

SEQ ID NO: 422 - protein, 586 aa, Drosophila virilis
MSLKWSLVLGLSWLLFVASSELKKHKPNELDDNINWWRHEVFYQIYPRSFKDSDGDGIGDLKGITSKLQYFVDTGITAIWLSPIYKSPMVDFGYDISDYRDIQPEYGTLEDFDALIAKANQLGIKVILDFVPNHSSDEHEWFKKSAAREPGYEDFYVWEDGIPGDNETRLPPNNWVSVFSGSAWQWHEERQQFYLRQFTKGQPDLNYRNPAVVQAMDEVLLYWLQKGVAGFRIDAVIYIYEDEQLRDEPLSGSTSDPNSVDYLEHIYTRNLPECYGLIQHWRQLLDNYTADNPGPVRIMMTEGYADLSLLMNYYEDEDGVQGAHFPFNFDFITELNANSAAPDFVYFIQRWLTYMPPGHSANWVMGNHDNPRVASRYGVGTVDAMNMLMMTLPGIGITYYGEELGMVDYRDISWNDTVDQPACDAGLDNYKWVSRDPERTPMQWSDEKNAGFSTGDSTWLPVHPNYQELNLLTQQEATYSHYKVYQSLIKLRQSRVLRDGSFTAQALNRNVFAIKRELRGQPTLLTVINVSNRTQQVDVSNFIDLPNRLTLLVVGVCSQHRVSERLKPAEVKLSPHEGLVIQLKAR

SEQ ID NO: 423 - DNA, 1329 bp, Thermotoga neapolitana
  CDS (1)..(1329): transl_table=11
atgataggctaccagatctacgtgagatcattcagggatggaaacttcgatggtgtgggggatttcaaaggattgaaaggtgcgatttcctacctgaaagaactgggtgttgattttgtctggctcatgcccgtcttttcctccatttccttccacgggtatgacgtggtggatttttattctttcaaagccgagtacggagacgagaaagactttagagagatgatcgaggcgttccacgacaacggtataaaagtcgttctcgatcttcccatccatcatactggtttcctccacacgtggtttcagaaagccctgaaaggagatccacactacagggattattacgtatgggcgagtgaaaaaacggatctggacgaaagaagagagtgggacaacgaaaggatctggcatcctctggaggacggaaggttctacagaggacttttcggtcccctctcacccgatctgaactacgataacccgcaggtttttgaagagatgaagaaggtggtttatcaccttcttgaaatgggagtggacggattcagattcgacgcagcaaagcacatgagagatactctggaacagaacgttcgcttttggaggtatttcctctccgatattgagggaatattccttgcggaaatctgggcagaatccaaagttgtggatgaacacggcaggatattcggctacatgctaaatttcgatacctcacactgtattaaggaagcggtgtggaaggaaaacttcaaagtgttgatcgagtcgatcgaaagggccctggttggaaaagattatctgccggtgaacttcacatcgaaccatgatatgtcaaggcttgcgagtttcgaaggagggttgagtgaagagaaggtgaaactctcactttccattctgttcacgcttcccggggttcctctcatattctacggagacgaactgggaatgaaaggaatctatcgaaaaccgaacacggaagtggttctggatccgttcccctggagtgaaaacatctctcttgaggggcagacgttctggaaatggccggcctacaacagtccattctctggtgtttctgttgagtatcaaaagaaaaaacgtgattcgatcctcttacacattatgaagtggacaggattcagaaaggaaaatcactggctggacagggcaaacatcgaatttctgtgcaaagaagaaaaactgctgcacgtgtacagactggtcgatgaagggcgttctctgaaagtgatacacaacctgtcgaatggtgaaatggtgtttgagggagtgcgcgtacaaccctacagcacggaggtgatttga

SEQ ID NO: 424 - protein, 442 aa, Thermotoga neapolitana
MIGYQIYVRSFRDGNFDGVGDFKGLKGAISYLKELGVDFVWLMPVFSSISFHGYDVVDFYSFKAEYGDEKDFREMIEAFHDNGIKVVLDLPIHHTGFLHTWFQKALKGDPHYRDYYVWASEKTDLDERREWDNERIWHPLEDGRFYRGLFGPLSPDLNYDNPQVFEEMKKVVYHLLEMGVDGFRFDAAKHMRDTLEQNVRFWRYFLSDIEGIFLAEIWAESKVVDEHGRIFGYMLNFDTSHCIKEAVWKENFKVLIESIERALVGKDYLPVNFTSNHDMSRLASFEGGLSEEKVKLSLSILFTLPGVPLIFYGDELGMKGIYRKPNTEVVLDPFPWSENISLEGQTFWKWPAYNSPFSGVSVEYQKKKRDSILLHIMKWTGFRKENHWLDRANIEFLCKEEKLLHVYRLVDEGRSLKVIHNLSNGEMVFEGVRVQPYSTEVI

SEQ ID NO: 425 - DNA, 2001 bp, Thermoactinomyces vulgaris
  CDS (1)..(2001): transl_table=11
atgatcaaattattaaagccgatgtctttgtccatcctccttgtcttcattctctcattttcttttccatttcccacggcaaaggcggccgccaatgacaacaatgtggagtggaatggattgtttcatgatcaaggcccgctttttgacaacgcgccggagcccacttcaacccagagtgtcacgcttaaactgcgaaccttcaaaggagatattaccagcgccaatatcaagtattgggatactgccgacaatgcctttcactgggtgcccatggtttgggattccaatgacccgacaggcacgtttgattactggaaagggacgatcccggcaagcccatcgatcaagtattaccgtttccaaattaacgatggcacaagcacggcctggtacaacggcaatggcccttcttccaccgaaccgaatgccgatgatttttatattattcccaatttcaaaacgccggactggctgaaaaacggcgtaatgtaccagatctttccggatcgtttctacaatggcgattcttcaaatgatgtccagacaggctcctatacctataacggcaccccaacggagaaaaaagcatggggcagcagcgtttacgctgatccggggtacgacaatagtttggtcttttttggcggagacctggcgggaatcgatcaaaaactgggctatatcaaaaagactctcggcgcgaacatcctctatctgaatcccatcttcaaggcgccaaccaaccacaaatacgacacccaggactacatggcggttgatcccgcgtttggcgacaattccaccttgcaaacgctgatcaacgacatacacagcaccgcgaacggccctaaagggtaccttattttggacggggtgttcaaccacacgggagacagccatccgtggtttgacaaatacaataatttttcgtctcagggagcatacgagtcacaatccagcccatggtacaactactatactttctacacatggcccgattcatacgcttcttttctcggattcaacagtttgcccaaactaaactacggcaacagcggttcagccgtacggggcgtaatctacaacaacagcaattcggtggctaaaacctatttaaacccgccttattctgtcgatggttggcggctcgatgcagcacaatatgttgacgcaaatggcaacaatggaagtgacgtgaccaaccaccagatttggagcgaatttcggaatgccgtcaagggagtgaattcaaacgccgcaatcatcggggagtattggggcaacgccaatccatggacggcccagggaaaccagtgggacgcagccaccaactttgatggcttcacccagcctgtttctgaatggattaccggcaaagactaccaaaacaattcggcttcgatcagcaccacacagtttgacagttggcttagggggacacgggccaactaccctaccaatgtccaacagtccatgatgaacttcctttccaatcatgacatcacccgctttgccacacgttccggcggagatctttggaaaacctacttggccctgatctttcagatgacttatgtgggcactccgaccatttactatggggacgaatacggcatgcagggaggcgcggaccccgacaaccgccggtcctttgattggtcacaagccactccctccaatagcgcggtggccctgacccaaaagctgatcaccattcgcaaccaataccctgctttaagaaccggttcctttatgacattaatcacggacgacaccaacaaaatttattcttatgggcgttttgacaacgtcaaccgaatcgccgtcgtgctaaacaatgactccgtcagccatacggtcaacgtgccggtttggcaactcagcatgccaaatggcagcactgtcacggacaaaattaccggccatagttacaccgtacaaaacggcatggttaccgttgccgttgacgggcactacggcgctgtcttggcacaataa

SEQ ID NO: 426 - protein, 666 aa, Thermoactinomyces vulgaris
MIKLLKPMSLSILLVFILSFSFPFPTAKAAANDNNVEWNGLFHDQGPLFDNAPEPTSTQSVTLKLRTFKGDITSANIKYWDTADNAFHWVPMVWDSNDPTGTFDYWKGTIPASPSIKYYRFQINDGTSTAWYNGNGPSSTEPNADDFYIIPNFKTPDWLKNGVMYQIFPDRFYNGDSSNDVQTGSYTYNGTPTEKKAWGSSVYADPGYDNSLVFFGGDLAGIDQKLGYIKKTLGANILYLNPIFKAPTNHKYDTQDYMAVDPAFGDNSTLQTLINDIHSTANGPKGYLILDGVFNHTGDSHPWFDKYNNFSSQGAYESQSSPWYNYYTFYTWPDSYASFLGFNSLPKLNYGNSGSAVRGVIYNNSNSVAKTYLNPPYSVDGWRLDAAQYVDANGNNGSDVTNHQIWSEFRNAVKGVNSNAAIIGEYWGNANPWTAQGNQWDAATNFDGFTQPVSEWITGKDYQNNSASISTTQFDSWLRGTRANYPTNVQQSMMNFLSNHDITRFATRSGGDLWKTYLALIFQMTYVGTPTIYYGDEYGMQGGADPDNRRSFDWSQATPSNSAVALTQKLITIRNQYPALRTGSFMTLITDDTNKIYSYGRFDNVNRIAVVLNNDSVSHTVNVPVWQLSMPNGSTVTDKITGHSYTVQNGMVTVAVDGHYGAVLAQ

SEQ ID NO: 427 - DNA, 1758 bp, Thermoactinomyces vulgaris
  CDS (1)..(1758): transl_table=11
atgctgttggaagcgatttttcatgaagcgaaaggaagctatgcttacccgatttcggaaacgcaactgcgggtgagattgcgggcgaaaaaaggggacgtggtgagatgcgaggtgctctatgcggaccgctatgcttcgccggaggaagaactggcacatgcacttgcgggcaaagcagggtccgatgagcgatttgattattttgaggctttactggaatgttccaccaaacgggtgaaatacgtgtttttgttgacaggcccacaaggggaggctgtttattttggcgagaccggtttttccgccgaacggtctaaagcgggggtgttccaatatgcttacatccaccggagcgaagtgtttacgacaccggaatgggcaaaggaggcggtgatctaccagatctttcccgaacgttttgccaatggggatcccagcaatgatccgccgggaacggaacaatgggccaaagacgccagacctcggcacgacagtttttacggcggagatttaaagggggtgatcgaccgtttgccatatttggaggagttgggagtgacggcgctttattttactcccatttttgcttcgccgtcccatcacaaatatgatacagctgattatttggcgattgatccgcaatttggggatttgcccacctttcggcgtttggtggatgaagctcaccggcgcgggatcaaaatcattttggatgccgtgtttaaccatgccggagatcagttttttgcgtttcgggatgttctgcaaaagggagaacagtcgcgatataaggattggtttttcatcgaggattttcccgtttccaagacgtcaagaaccaattatgaaacctttgccgtccaagtgccggccatgcccaaattgcggacggaaaatccggaagtgaaggaatatttgtttgatgtcgcgcgattttggatggagcaggggatcgacggatggagactggatgtggccaatgaggtggatcacgccttttggcgcgagtttcgccgccttgtcaaatccctcaatcccgacgccttgattgtcggagagatttggcatgacgcttccggctggctgatgggagaccaatttgattcggtgatgaattatttgtttcgcgagagtgtgatccgtttttttgccacgggggagatccatgccgaaagatttgacgccgaacttacccgggccaggatgctttatccggaacaggcggcacaagggttatggaacctcctcgactcacacgatacggaacgttttttgacatcgtgtggggggaatgaggcgaaattccgcctggctgttttgtttcagatgacatacctggggacgccgctgatttattacggtgatgagatcgggatggccggagcgacggacccggattgccggcgcccgatgatatgggaggaaaaagagcagaaccgcggcttgtttgagttttataaggaattgattcgcttgcgccatcggctggcatcgctcaccaggggaaatgtccggtcttggcatgccgacaaacaagccaatctttatgcttttgtgcgcacggttcaagaccaacatgtcggtgtggttctcaataatcgtggcgagaagcaaaccgttttgctacaggtgccggaatcgggcggaaaaacttggctggattgtttgaccggagaagaagtgcatggcaaacaagggcaactgaagctgacacttcgcccttaccagggaatgattctctggaatggccggtag

SEQ ID NO: 428 - protein, 585 aa, Thermoactinomyces vulgaris
MLLEAIFHEAKGSYAYPISETQLRVRLRAKKGDVVRCEVLYADRYASPEEELAHALAGKAGSDERFDYFEALLECSTKRVKYVFLLTGPQGEAVYFGETGFSAERSKAGVFQYAYIHRSEVFTTPEWAKEAVIYQIFPERFANGDPSNDPPGTEQWAKDARPRHDSFYGGDLKGVIDRLPYLEELGVTALYFTPIFASPSHHKYDTADYLAIDPQFGDLPTFRRLVDEAHRRGIKIILDAVFNHAGDQFFAFRDVLQKGEQSRYKDWFFIEDFPVSKTSRTNYETFAVQVPAMPKLRTENPEVKEYLFDVARFWMEQGIDGWRLDVANEVDHAFWREFRRLVKSLNPDALIVGEIWHDASGWLMGDQFDSVMNYLFRESVIRFFATGEIHAERFDAELTRARMLYPEQAAQGLWNLLDSHDTERFLTSCGGNEAKFRLAVLFQMTYLGTPLIYYGDEIGMAGATDPDCRRPMIWEEKEQNRGLFEFYKELIRLRHRLASLTRGNVRSWHADKQANLYAFVRTVQDQHVGVVLNNRGEKQTVLLQVPESGGKTWLDCLTGEEVHGKQGQLKLTLRPYQGMILWNGR

SEQ ID NO: 429 - DNA, 24 bp, Artificial sequence
  primer
atgatgttaaatgcatggcacctg

SEQ ID NO: 430 - DNA, 24 bp, Artificial sequence
  primer
ttagttcatccataccgtagccga

SEQ ID NO: 431 - protein, 799 aa, Artificial sequence
  consensus sequence
  Variant (2)..(7): Xaa in position 2 to 7 is any amino acid
  Variant (9)..(14): Xaa in position 9 to 14 is any amino acid
  Variant (16)..(23): Xaa in position 16 to 23 is any amino acid
  Variant (24)..(83): Xaa in position 24 to 83 is any or no amino acid
  Variant (86)..(87): Xaa in position 86 to 87 is any amino acid
  Variant (89)..(92): Xaa in position 89 to 92 is any amino acid
  Variant (94)..(94): Xaa in position 94 is any amino acid
  Variant (96)..(97): Xaa in position 96 to 97 is any amino acid
  Variant (98)..(106): Xaa in position 98 to 106 is any or no amino acid
  Variant (109)..(115): Xaa in position 109 to 115 is any amino acid
  Variant (117)..(124): Xaa in position 117 to 124 is any amino acid
  Variant (125)..(152): Xaa in position 125 to 152 is any or no amino acid
  Variant (155)..(156): Xaa in position 155 to 156 is any amino acid
  Variant (159)..(162): Xaa in position 159 to 162 is any amino acid
  Variant (163)..(165): Xaa in position 163 to 165 is any or no amino acid
  Variant (167)..(181): Xaa in position 167 to 181 is any amino acid
  Variant (183)..(187): Xaa in position 183 to 187 is any amino acid
  Variant (188)..(191): Xaa in position 188 to 191 is any or no amino acid
  Variant (193)..(193): Xaa in position 193 is any amino acid
  Variant (195)..(195): Xaa in position 195 is any amino acid
  Variant (198)..(204): Xaa in position 198 to 204 is any amino acid
  Variant (206)..(228): Xaa in position 206 to 228 is any amino acid
  Variant (229)..(393): Xaa in position 229 to 393 is any or no amino acid
  Variant (395)..(395): Xaa in position 395 is any amino acid
  Variant (398)..(404): Xaa in position 398 to 404 is any amino acid
  Variant (405)..(419): Xaa in position 405 to 419 is any or no amino acid
  Variant (421)..(424): Xaa in position 421 to 424 is any amino acid
  Variant (425)..(431): Xaa in position 425 to 431 is any or no amino acid
  Variant (434)..(434): Xaa in position 434 is any amino acid
  Variant (436)..(436): Xaa in position 436 is any amino acid
  Variant (438)..(500): Xaa in position 438 to 500 is any amino acid
  Variant (501)..(607): Xaa in position 501 to 607 is any or no amino acid
  Variant (609)..(629): Xaa in position 609 to 629 is any amino acid
  Variant (630)..(669): Xaa in position 630 to 669 is any or no amino acid
  Variant (671)..(671): Xaa in position 671 is any amino acid
  Variant (673)..(674): Xaa in position 673 to 674 is any amino acid
  Variant (676)..(676): Xaa in position 676 is any amino acid
  Variant (678)..(678): Xaa in position 678 is any amino acid
  Variant (680)..(680): Xaa in position 680 is any amino acid
  Variant (682)..(687): Xaa in position 682 to 687 is any amino acid
  Variant (688)..(729): Xaa in position 688 to 729 is any or no amino acid
  Variant (731)..(734): Xaa in position 731 to 734 is any amino acid
  Variant (736)..(750): Xaa in position 736 to 750 is any amino acid
  Variant (751)..(798): Xaa in position 751 to 798 is any or no amino acid
WXXXXXXYXXXXXXFXXXXXXXXXXXXXXXXXXXXXXXXXXXXXXXXXXXXXXXXXXXXXXXXXXXXXXXXXXXXXXXXXXXXGDXXGXXXXLXYXXXXXXXXXXXLGXXXXXXXPXXXXXXXXXXXXXXXXXXXXXXXXXXXXXXXXXXXXYDXXDYXXXXXXXGXXXXXXXXXXXXXXXGXXXXXXXXXDXVXNHXXXXXXXFXXXXXXXXXXXXXXXXXXXXXXXXXXXXXXXXXXXXXXXXXXXXXXXXXXXXXXXXXXXXXXXXXXXXXXXXXXXXXXXXXXXXXXXXXXXXXXXXXXXXXXXXXXXXXXXXXXXXXXXXXXXXXXXXXXXXXXXXXXXXXXXXXXXXXXXXXXXXXXXXXXXXXXXXXXXXXXXXXXXXXXXXXXXXPXLNXXXXXXXXXXXXXXXXXXXXXXWXXXXXXXXXXXDGXRXDXXXXXXXXXXXXXXXXXXXXXXXXXXXXXXXXXXXXXXXXXXXXXXXXXXXXXXXXXXXXXXXXXXXXXXXXXXXXXXXXXXXXXXXXXXXXXXXXXXXXXXXXXXXXXXXXXXXXXXXXXXXXXXXXXXXXXXXXXXXXXXXXXXXXXXXXXXXXXXXXXXXXXXXXXXRXXXXXXXXXXXXXXXXXXXXXXXXXXXXXXXXXXXXXXXXXXXXXXXXXXXXXXXXXXXXXGXPXXYXGXEXGXXXXXXXXXXXXXXXXXXXXXXXXXXXXXXXXXXXXXXXXXXXXXXXXRXXXXWXXXXXXXXXXXXXXXXXXXXXXXXXXXXXXXXXXXXXXXXXXXXXXXXXXXXXXXXXXXXXXXR

SEQ ID NO: 432 - protein, 8 aa, Artificial sequence
  protein pattern
  Variant (2)..(2): Xaa in position 2 is Glu or Gln
  Variant (3)..(3): Xaa in position 3 is Ile, Leu or Val
  Variant (4)..(7): Xaa in position 4 to 7 is any amino acid
YXXXXXXF

SEQ ID NO: 433 - protein, 72 aa, Artificial sequence
  protein pattern
  Variant (2)..(12): Xaa in position 2 to 12 is any amino acid
  Variant (14)..(16): Xaa in position 14 to 16 is any amino acid
  Variant (17)..(17): Xaa in position 17 is Phe, Ile, Leu, Met or Val
  Variant (18)..(18): Xaa in position 18 is Trp or Tyr
  Variant (19)..(19): Xaa in position 19 is Phe, Ile, Leu, Met or Val
  Variant (20)..(20): Xaa in position 20 is any amino acid
  Variant (22)..(30): Xaa in position 22 to 30 is any amino acid
  Variant (31)..(31): Xaa in position 31 is any or no amino acid
  Variant (33)..(35): Xaa in position 33 to 35 is any amino acid
  Variant (36)..(36): Xaa in position 36 is Asp, Glu, Asn or Thr
  Variant (37)..(39): Xaa in position 37 to 39 is any amino acid
  Variant (40)..(40): Xaa in position 40 is Phe, Ile, Leu or Val
  Variant (41)..(44): Xaa in position 41 to 44 is any amino acid
  Variant (46)..(52): Xaa in position 46 to 52 is any amino acid
  Variant (53)..(53): Xaa in position 53 is Phe, Leu, Met or Val
  Variant (54)..(61): Xaa in position 54 to 61 is any amino acid
  Variant (62)..(62): Xaa in position 62 is Phe, Ile, Leu, Met or Val
  Variant (63)..(63): Xaa in position 63 is any amino acid
  Variant (64)..(64): Xaa in position 64 is Ile, Leu or Val
  Variant (65)..(66): Xaa in position 65 to 66 is any amino acid
  Variant (67)..(67): Xaa in position 67 is Asp or Glu
  Variant (68)..(71): Xaa in position 68 to 71 is any amino acid
GXXXXXXXXXXXGXXXXXXXPXXXXXXXXXXYXXXXXXXXXXXXGXXXXXXXXXXXXXXXXXXXXXXXXXXH

SEQ ID NO: 434 - protein, 14 aa, Artificial sequence
  protein pattern
  Variant (2)..(6): Xaa in position 2 to 6 is any amino acid
  Variant (7)..(8): Xaa in position 7 to 8 is any or no amino acid
  Variant (10)..(10): Xaa in position 10 is Ala or Gly
  Variant (11)..(11): Xaa in position 11 is any amino acid
  Variant (13)..(13): Xaa in position 13 is Phe, Ile, Leu, Met or Val
WXXXXXXXDXXRXD

SEQ ID NO: 435 - protein, 12 aa, Artificial sequence
  protein pattern
  Variant (2)..(2): Xaa in position 2 is any amino acid
  Variant (3)..(3): Xaa in position 3 is Ala, Ile, Pro or Val
  Variant (4)..(5): Xaa in position 4 to 5 is any amino acid
  Variant (7)..(7): Xaa in position 7 is any amino acid
  Variant (9)..(9): Xaa in position 9 is Asp, Glu, Gly, Asn, Gln, Ser or Thr
  Variant (11)..(11): Xaa in position 11 is any amino acid
GXXXXYXGXEXG

SEQ ID NO: 436 - DNA, 276 bp, Escherichia coli K12
  CDS (1)..(276): transl_table=11
atgaaagtaaacttaatacttttcagcttatttttattggtctctattatggcatgcaatgtttttgcattttccatttcgggtggtggaagtgagaggagctataaagagactgaaaaaacatcagcgatgacgaccacacactctacaaaacttcagccatcacaggcgattttgtttaagatgagagaagatgcgccaccattaaacctcacagaagaaatgccgcccccttttccgacaaaggcgaattatcttattcatcctgtgcgatag

SEQ ID NO: 437 - protein, 91 aa, Escherichia coli K12
MKVNLILFSLFLLVSIMACNVFAFSISGGGSERSYKETEKTSAMTTTHSTKLQPSQAILFKMREDAPPLNLTEEMPPPFPTKANYLIHPVR

SEQ ID NO: 438 - DNA, 276 bp, Escherichia coli O157:H7 EDL933
  CDS (1)..(276): transl_table=11
atgaaagtaaacttaatactttttagcttatttttattggtctctattatggcatgcaatgtttttgcattttctaattctggtggtggtagtgagacgagctataaagagccagaaaaaacgtcagcgatgacgacaactcactctacaaaatttcagccatcacaggcgattttgtttaagatgagagaagatgcaccaccattaaacctcacagaagaaaccacgcccccttttccgacaaaggcgaattatcttattcatcctgtgcgatag

SEQ ID NO: 439 - protein, 91 aa, Escherichia coli O157:H7 EDL933
MKVNLILFSLFLLVSIMACNVFAFSNSGGGSETSYKEPEKTSAMTTTHSTKFQPSQAILFKMREDAPPLNLTEETTPPFPTKANYLIHPVR

SEQ ID NO: 440 - DNA, 276 bp, Escherichia coli CFT073
  CDS (1)..(276): transl_table=11
atgaaagtaaacttaatgctttttagcttatttttatttgtctctattatggcatgcaatgtttttgcattttctatttctggtggtggtagtgaggcgagctataaagagacagaaaaaacgtcagtgatgacgacaacgcattctacaaaacttcagccatcacaggcgattttgtttaagatgagagaagatgcaccaccattaaacctcacagaagacatcacgcctacttatccgacaaaggcgaattatctcattcatcctttgcgatag

SEQ ID NO: 441 - protein, 91 aa, Escherichia coli CFT073
MKVNLMLFSLFLFVSIMACNVFAFSISGGGSEASYKETEKTSVMTTTHSTKLQPSQAILFKMREDAPPLNLTEDITPTYPTKANYLIHPLR

SEQ ID NO: 442 - DNA, 276 bp, Shigella flexneri 2a str. 2457T
  CDS (1)..(276): transl_table=11
atgaaagtaaacttaatacttttcagcttatttttattggtctctattatggcatgcaatgtttttgcattttccatttctggtggtgtaagtgagaggagctataaagagactgaaaaaacatcagcgatgacgaccacacactctacaaaacttcagccatcacaggcgattttgtttaagatgagagaagatgtgccaccattaaacctcacagaagaaatcacgcctacttatccgacaaaggcgaattatcttattcatcctgtgcgatag

SEQ ID NO: 443 - protein, 91 aa, Shigella flexneri 2a str. 2457T
MKVNLILFSLFLLVSIMACNVFAFSISGGVSERSYKETEKTSAMTTTHSTKLQPSQAILFKMREDVPPLNLTEEITPTYPTKANYLIHPVR

SEQ ID NO: 444 - DNA, 276 bp, Shigella sonnei Ss046
  CDS (1)..(276): transl_table=11
atgaaagtaaacttaatacttttcagcttatttttattggtctctattatggcatgcaatgtttttgcattttccatttctggtggtgtaagtgagaggagctataaagagactgaaaaaacatcagcgatgacaaccacacactctacaaaacttcagccatcacaggcgattttgtttaagatgagagaagatgcgccaccattaaacctcacagaagaaatcacgcctacttatccgacaaaggcgaattatcttattcatcctgtgcgatag

SEQ ID NO: 445 - protein, 91 aa, Shigella sonnei Ss046
MKVNLILFSLFLLVSIMACNVFAFSISGGVSERSYKETEKTSAMTTTHSTKLQPSQAILFKMREDAPPLNLTEEITPTYPTKANYLIHPVR

SEQ ID NO: 446 - DNA, 27 bp, Artificial sequence
  primer
atgaaagtaaacttaatacttttcagc

SEQ ID NO: 447 - DNA, 27 bp, Artificial sequence
  primer
ttatcgcacaggatgaataagataatt

SEQ ID NO: 448 - protein, 91 aa, Artificial sequence
  consensus sequence
  Variant (6)..(6): Xaa in position 6 is any amino acid
  Variant (13)..(13): Xaa in position 13 is any amino acid
  Variant (26)..(26): Xaa in position 26 is any amino acid
  Variant (30)..(30): Xaa in position 30 is any amino acid
  Variant (33)..(33): Xaa in position 33 is any amino acid
  Variant (38)..(38): Xaa in position 38 is any amino acid
  Variant (43)..(43): Xaa in position 43 is any amino acid
  Variant (52)..(52): Xaa in position 52 is any amino acid
  Variant (66)..(66): Xaa in position 66 is any amino acid
  Variant (74)..(76): Xaa in position 74 to 76 is any amino acid
  Variant (78)..(79): Xaa in position 78 to 79 is any amino acid
  Variant (90)..(90): Xaa in position 90 is any amino acid
MKVNLXLFSLFLXVSIMACNVFAFSXSGGXSEXSYKEXEKTSXMTTTHSTKXQPSQAILFKMREDXPPLNLTEXXXPXXPTKANYLIHPXR

SEQ ID NO: 449 - protein, 91 aa, Artificial sequence; identical to SEQ ID NO: 448
  protein pattern
  Variant (6)..(6): Xaa in position 6 is Ile or Met
  Variant (13)..(13): Xaa in position 13 is Phe or Leu
  Variant (26)..(26): Xaa in position 26 is any amino acid
  Variant (30)..(30): Xaa in position 30 is Gly or Val
  Variant (33)..(33): Xaa in position 33 is any amino acid
  Variant (38)..(38): Xaa in position 38 is Pro or Thr
  Variant (43)..(43): Xaa in position 43 is Ala or Val
  Variant (52)..(52): Xaa in position 52 is Phe or Leu
  Variant (66)..(66): Xaa in position 66 is Ala or Val
  Variant (74)..(74): Xaa in position 74 is Asp or Glu
  Variant (75)..(75): Xaa in position 75 is any amino acid
  Variant (76)..(76): Xaa in position 76 is Pro or Thr
  Variant (78)..(78): Xaa in position 78 is Pro or Thr
  Variant (79)..(79): Xaa in position 79 is Phe or Tyr
  Variant (90)..(90): Xaa in position 90 is Leu or Val

SEQ ID NO: 450 - DNA, 927 bp, Escherichia coli K12
  CDS (1)..(927)
atgtctgagcagtttttgtatttcttgcagcagatgtttaacggcgtcacgctgggcagtacttacgcgctgattgccatcggctacaccatggtttacggcattatcggcatgatcaacttcgcccacggcgaggtttacatgatcggcagctacgtctcatttatgatcatcgccgcactgatgatgatgggcattgataccggctggctgctggtagcggcgggattcgtcggcgcaatcgtcattgccagcgcctacggctggagtatcgaacgggtggcttaccgcccggtgcgtaactctaagcgcctgattgcactcatctcggcaatcggtatgtccatcttcctgcaaaactacgtcagcctgactgaaggttcgcgcgacgtggcgctgcccagcttgtttaatggtcagtgggtagtgggtcatagcgaaaacttctctgcctctattaccaccatgcaggcggtgatctggattgtcaccttcctcgccatgctggcgctgacgattttcattcgttattcccgtatggggcgcgcctgccgtgcctgcgccgaagatctgaaaatggcgagcctgcttggcattaacaccgaccgggtgattgctttgacctttgtgattggcgcggcgatggcggcggtggcgggcgtactgctcggtcagttctacggcgtcattaacccctatatcggctttatggccgggatgaaagcctttaccgctgcggtgctcggtgggattggcagcattccgggagcgatgattggcgggctgattctggggattgcggaggcgctctcttctgcctacctgagtacggaatataaagatgtggtctcattcgccctgctgattctggtgctgctggtgatgccgaccggtattctgggtcgcccggaggtagagaaagtatga

SEQ ID NO: 451 - protein, 308 aa, Escherichia coli K12
MSEQFLYFLQQMFNGVTLGSTYALIAIGYTMVYGIIGMINFAHGEVYMIGSYVSFMIIAALMMMGIDTGWLLVAAGFVGAIVIASAYGWSIERVAYRPVRNSKRLIALISAIGMSIFLQNYVSLTEGSRDVALPSLFNGQWVVGHSENFSASITTMQAVIWIVTFLAMLALTIFIRYSRMGRACRACAEDLKMASLLGINTDRVIALTFVIGAAMAAVAGVLLGQFYGVINPYIGFMAGMKAFTAAVLGGIGSIPGAMIGGLILGIAEALSSAYLSTEYKDVVSFALLILVLLVMPTGILGRPEVEKV

SEQ ID NO: 452 - DNA, 1017 bp, Archaeoglobus fulgidus
  CDS (1)..(1017)
atggtccgagttcgtgatgcttctaacgatcgtggcgattctaattgtcaagccaacgggtctgttcggggtggaagaatgaggataacaagggcctttaacgcgctggctttgattgtcgctgcggtcatgccgttcattcttccggaggcgtacctttacatcctcggcctcgcgtacattttcgcaataatggttatcagctgggacctcatggtaggctacacggggcaggtgaacctgggccacacaacctttgtggggcttggagcttacgttgcagcaattctgcagactcctataagggcggggctgtcgctgcatccggcattggcaataataaccggcggtgttgttgcggcaggagttgggctttcaattggtattatcacgctcagactcagaggctactacttttccctggttacggcaatacttccgctcgtcttcatgcagacggtcttcatctggagggagctttttggtggtgaggaaggatttgcgatagagaacacgatgctcacaacaaccgtggagaagtactacttcagccttgcagttctcgtcgtgtccttagtcgtaatgaagaaggtggtggacagcaggattgggctgaggtttatggctttgagggacagcgaggagcttgccgagagtctgggaataaacgcgaccaaatacaaggttctcgccttcgcgctaagctccttctttgcgggaattgctggagcgatggtcgttaactaccgcgttaccgtaagtccggagctttacggagtacctttgatgctgctgataatcctctcagccgttctcggaggactggggactctttacggccctcttgctggagccatagtaatttaccttgcgaagaactggtggctcggacagatcattcgaacgctctctctccctataaacgacgacatcgtcctctacgcccttctgatagccgtcggaattctgatgccggaaggtctttaccacaaggtaaaagtcaataagcagaagtaa

SEQ ID NO: 453 - protein, 338 aa, Archaeoglobus fulgidus
MVRVRDASNDRGDSNCQANGSVRGGRMRITRAFNALALIVAAVMPFILPEAYLYILGLAYIFAIMVISWDLMVGYTGQVNLGHTTFVGLGAYVAAILQTPIRAGLSLHPALAIITGGVVAAGVGLSIGIITLRLRGYYFSLVTAILPLVFMQTVFIWRELFGGEEGFAIENTMLTTTVEKYYFSLAVLVVSLVVMKKVVDSRIGLRFMALRDSEELAESLGINATKYKVLAFALSSFFAGIAGAMVVNYRVTVSPELYGVPLMLLIILSAVLGGLGTLYGPLAGAIVIYLAKNWWLGQIIRTLSLPINDDIVLYALLIAVGILMPEGLYHKVKVNKQK

SEQ ID NO: 454 - DNA, 894 bp, Archaeoglobus fulgidus
  CDS (1)..(894)
atgatgattgaaataaattatttcatgaacctgctcttagggggactcgtagtggggttcatttatgccctaacggcactggggattacaataatctacggtattttgcagattccggatttctcccacgggaacagatacatgatcggtgcttacgcgggattccttgcagcctcagtagctggcagcatgcttgaaatcagctatgttgctgcaattctcggtgcagtagcagtctcttccgtaattgccgttctgagctaccttttcgtttacaagagattgctaagtgctcctcacataacgtcattcattgcagcaataggtcttttaatgctgctggaaggattcgccctggcagtcttcggtccgagataccagcgcattcacacacccttcgactacatggttgttattggagcactgagaattaacgcgcagaggcttatcgtccttttctgctccatcgccgccatagcgtctctgctgtactttttgagaaggacggtaaccggaatagctctcgaggctgttgctcaatcgccaataggagcgaagctcgttggaatcaacaccgataagatgacgctaatagcctttgccattgccggggcgcttgcaggtttcgcagcggcattaattgctccaataactcttgtgtatcctataatgggtgctgagctcaacttgaaggccttcgtaatctgcgtcgttggtgggcttgggaacatcccgggtgccatagccggagggctggtcctcggaattgttgaatccctctacggcggttattttgacatcaggtggaaaaacctcgttgcgtttgggattcttgtcgccatcctgattctcaagccagaaggtctgtttggtaagaaggagaggagagcatga

SEQ ID NO: 455 - protein, 297 aa, Archaeoglobus fulgidus
MMIEINYFMNLLLGGLVVGFIYALTALGITIIYGILQIPDFSHGNRYMIGAYAGFLAASVAGSMLEISYVAAILGAVAVSSVIAVLSYLFVYKRLLSAPHITSFIAAIGLLMLLEGFALAVFGPRYQRIHTPFDYMVVIGALRINAQRLIVLFCSIAAIASLLYFLRRTVTGIALEAVAQSPIGAKLVGINTDKMTLIAFAIAGALAGFAAALIAPITLVYPIMGAELNLKAFVICVVGGLGNIPGAIAGGLVLGIVESLYGGYFDIRWKNLVAFGILVAILILKPEGLFGKKERRA

SEQ ID NO: 456 - DNA, 1278 bp, Pseudomonas aeruginosa
  CDS (1)..(1278)
atgagcaacgagacttccatcgatctcaagcagtgcgtcctcgatgccgtgctctccgggttgatcgccctggtggtgttcggccccatcgtcggcgtggtcctcgacggctacggcttcaacctgcattacgagcgggtcggctggatcatcgcgatcgtgatggccgggcgcttcctgctcagcctctacctgcagacccgcggcgggcgcgccgtgctggagcgcttcgagggggctggcagcggcgtccacgtcctgccgccgggctacaagacccgcttgcgctggatcgtgccgctgatcctggtggccgcggtgatcttcccgttcttcgccagcaagtacctgctggcggtggtcatcctcggcctgatctacgtgctgctgggcctgggcctgaacatcgtggtcggcctcgccgggctgctcgacctcggctacgtggccttctacgccatcggcgcctatggcctggcgctgggctaccagtacctcggcctgggcttctggaccgtcctgccgctggccgcgctgaccgccgcggtggccggggcgatcctcggcttcccggtgttgcgcatgcatggcgactacctggcgatcgtcaccctgggcttcggcgagatcatccgcctggtactgaacaactggctgtccttcaccggcgggccgaacggcatgccggcgccggcgccgaccttcctcggcctggagttcggccgccgggccaaggatggcggggtgccgatccacgagttcctcggcatcgcctacaaccccaacatgaagttcctgttcatctacgtggtgctgttcctggtcgtgctgctggtgctctacatcaagcaccggctgacccggatgccggtcgggcgcgcctgggaggcgctgcgcgaggacgagatcgcctgtcgcgcgatgggcctcaaccatgtgctggtgaaactctcggcgttcatgctcggcgcctccaccgcgggactggccggggtgttcttcgccagctaccagggcttcgtcaacccgtcctcgttcaacttcttcgagtcggcgctgatcctcgccatcgtcgtgctcggcggcatgggctcgacggtcggggtggtgatcgccgccttcgtcctcaccgtggcgccggagctgctgcgcagcttcgccgacatccgcgtgctgctgctcgggatactcatggtggtgatgatgatctggcggccgcgcgggctgatccgcatcagccgggtgggcttcgccccgcgcaagggggtggcgccatga

SEQ ID NO: 457 - protein, 425 aa, Pseudomonas aeruginosa
MSNETSIDLKQCVLDAVLSGLIALVVFGPIVGVVLDGYGFNLHYERVGWIIAIVMAGRFLLSLYLQTRGGRAVLERFEGAGSGVHVLPPGYKTRLRWIVPLILVAAVIFPFFASKYLLAVVILGLIYVLLGLGLNIVVGLAGLLDLGYVAFYAIGAYGLALGYQYLGLGFWTVLPLAALTAAVAGAILGFPVLRMHGDYLAIVTLGFGEIIRLVLNNWLSFTGGPNGMPAPAPTFLGLEFGRRAKDGGVPIHEFLGIAYNPNMKFLFIYVVLFLVVLLVLYIKHRLTRMPVGRAWEALREDEIACRAMGLNHVLVKLSAFMLGASTAGLAGVFFASYQGFVNPSSFNFFESALILAIVVLGGMGSTVGVVIAAFVLTVAPELLRSFADIRVLLLGILMVVMMIWRPRGLIRISRVGFAPRKGVAP

SEQ ID NO: 458 - DNA, 957 bp, Streptococcus pneumoniae
  CDS (1)..(957)
atgaaggaaaatttaaaagttaatattctatggttactccttttgttagctggctatagcttgattagtgtactggtttcagtcggagtacttaatctattctatgtacagattttacaacaaattggaattaatattattttggctgttggtctcaacttaatcgttggtttttcaggacaattttcacttggtcatgctggtttcatggcgattggtgcctatgcagcagctattattggttctaaatcaccaacctacggtgccttctttggagctatgcttgtaggggctttgctttcaggagcagttgccttacttgtcggcattccaaccttgcgcttgaagggggactatcttgcggtagcaactctaggtgtttctgaaattatccgtatctttatcatcaatggtggaagccttacaaatggtgcggcaggtatcttagggattcctaactttacaacttggcaaatggtttacttctttgtcgtgattacaaccattgcaaccttgaacttcttgcgtagcccaattggtcgttcaaccctctctgttcgtgaagatgaaatcgctgctgagtcagttggggttaatacgactaaaattaaaatcatcgcttttgtctttggtgccattactgcaagtattgctgggtcacttcaggcaggatttatcgggtctgttgtaccgaaagattacaccttcatcaactcaatcaacgttttgattattgttgtatttggtggactcggttccattacaggtgcgattgtttcggctattgttctgggaattttgaatatgcttctccaagatgttgctagtgtgcgtatgattatttacgctttggccttggtattggtaatgattttcagaccaggtggactccttggaacatgggaactgagcctatcacgtttctttaaaaaatctaagaaggaggaacaaaactaa

SEQ ID NO: 459 - protein, 318 aa, Streptococcus pneumoniae
MKENLKVNILWLLLLLAGYSLISVLVSVGVLNLFYVQILQQIGINIILAVGLNLIVGFSGQFSLGHAGFMAIGAYAAAIIGSKSPTYGAFFGAMLVGALLSGAVALLVGIPTLRLKGDYLAVATLGVSEIIRIFIINGGSLTNGAAGILGIPNFTTWQMVYFFVVITTIATLNFLRSPIGRSTLSVREDEIAAESVGVNTTKIKIIAFVFGAITASIAGSLQAGFIGSVVPKDYTFINSINVLIIVVFGGLGSITGAIVSAIVLGILNMLLQDVASVRMIIYALALVLVMIFRPGGLLGTWELSLSRFFKKSKKEEQN

SEQ ID NO: 460 - DNA, 999 bp, Brucella melitensis
  CDS (1)..(999)
atggaccgctcccctgttcgagctgaacttccaatcacggaccagaccatggatcagattctctttgccgtattgaacggcgcgatctacggattgctgctgttcatggtttcggcgggtctcaccctcattttcggcatgatgggggttctcaacttcgcacatgcttccttctatatgatgggagcctatttcgcttacacgcttcagccgcttaccggcttctggcttgcaatcctgattgcgcccgtgatcgtcggcattgtcggcattgtcggcgttctggttgaacgcttcattttgcgccgtgtccacgctttcggccatgcgcatgaattgctggtcacgttcggcctctcggtggtcattgctgaagtcatcaagattttctacggcaatttcgccgtcgaataccgcattcccgcagcactgcaattttcggctttcgatcttggcggggtgagctatccattctaccgcctgttcataggtgccgtggcgctggtgatgttcctgctgatctatctgctgctcacgcgcacccgcatcggcatcgtcgttcgctcggcaatctatcgcccgcgcatggtggaggcgctcggccacaatgttccgctggtcttcatgggcgtgttcggcgtcggcgcattccttgccggccttgccggttcggtggcgggcgcgttctatacgacaaacccgaacatggcgctggaactgggcgtcatggtcttcgtggtcgtcgtcgtgggcgggcttggctcgcttggcggagccatgtttgcttcgcttctgatcggcattctttcctccgtcgccgttggcgtgaaggtctcgatcgcaagcctcctcgattatgtggggcttggcgattatgcccgtgaaatcggcggcgtgctgacgctggaagtctccagcattgcagccaccctgccattcttcctgatgcttatcgttctcctggtacgtccaagcggactgttcggggcaaaggagtaa

SEQ ID NO: 461 - protein, 332 aa, Brucella melitensis
MDRSPVRAELPITDQTMDQILFAVLNGAIYGLLLFMVSAGLTLIFGMMGVLNFAHASFYMMGAYFAYTLQPLTGFWLAILIAPVIVGIVGIVGVLVERFILRRVHAFGHAHELLVTFGLSVVIAEVIKIFYGNFAVEYRIPAALQFSAFDLGGVSYPFYRLFIGAVALVMFLLIYLLLTRTRIGIVVRSAIYRPRMVEALGHNVPLVFMGVFGVGAFLAGLAGSVAGAFYTTNPNMALELGVMVFVVVVVGGLGSLGGAMFASLLIGILSSVAVGVKVSIASLLDYVGLGDYAREIGGVLTLEVSSIAATLPFFLMLIVLLVRPSGLFGAKE

SEQ ID NO: 462 - DNA, 942 bp, Agrobacterium tumefaciens
  CDS (1)..(942)
atggacgaggcgatttccagcatcgagagcgcactggccttctgggattatgcgcagaatgtctggtatggcctgtcgctcggttccgtgctgctgctggccgccatcggccttgccatcaccttcggcgtgatgggcatcatcaacatggcacatggcgagatggtgatgatcggcgcttactccaccttcatggtgcaggaagtgatccgcagtcacttccccggcctgttcgactggtcgctggcgattgccttgccagtcgcctttctggtgacaggttttgtcggcctcgtgatggaacgaggcgtcatccgcttcctctacgggcggcctttggaaacgctgctcgccacctggggcatctcgctgatgttgcaacagggcgtacgctccattttcggccccaccaaccgggaggttggcagccccggctggatgtccggctccttcagcgtcggttatctcaatttcacctggaaccgggtgtggatcgtctgcttctcgctgtcggtgttcttcgcgctgctggtgcttctgaagcgctccgccttcggtctgcagatgcgcgccgtgactcagaaccgccgcatggcctcctccatgggcattcgcacgccctgggtggatgccttcaccttcgcgctcggttcaggcgttgccgggcttgccggcgttgcgctatcgcagatcgacaatgtctcgcccaatctcggccagagctacatcatcgacagtttcatggtggtggtgttcggcggcgtcggcaatctctggggaacgctggtgggtgcattgtcgctcggcgtgctcaacaagttcctcgagccgacggtgggcgccgtgctcggcaagatcctcgtgctcgttctcatcatcctgttcatccagaagcggccgcgcggtctcttcgcactcaagggaagggcgatcgaagcatga

SEQ ID NO: 463 - protein, 313 aa, Agrobacterium tumefaciens
MDEAISSIESALAFWDYAQNVWYGLSLGSVLLLAAIGLAITFGVMGIINMAHGEMVMIGAYSTFMVQEVIRSHFPGLFDWSLAIALPVAFLVTGFVGLVMERGVIRFLYGRPLETLLATWGISLMLQQGVRSIFGPTNREVGSPGWMSGSFSVGYLNFTWNRVWIVCFSLSVFFALLVLLKRSAFGLQMRAVTQNRRMASSMGIRTPWVDAFTFALGSGVAGLAGVALSQIDNVSPNLGQSYIIDSFMVVVFGGVGNLWGTLVGALSLGVLNKFLEPTVGAVLGKILVLVLIILFIQKRPRGLFALKGRAIEA

SEQ ID NO: 464 - DNA, 897 bp, Agrobacterium tumefaciens
  CDS (1)..(897)
atggcttatttcctgcaacaattgctgaatgccgtgccggtcgcagccctctatgcggttctggccttcggctacgccatcgccttctcggtcacgaaacgcgccgatgtgacctatggcgccatctttgccttcgccgggcagacttgcctgctttttgctgacttcggctggaaccggctgtggctggttctgccggcaacattggcgctgggggcaggggccggcctgttcggcgggctttgggccgcgggtctcatcggtagggcggtcatgcggccgctggcaaaggcctctcccaacgcggtgaccgtggcctccatcggcgtgctgattgcgctcacggaaagcgcaaggctcgccgccgatacaaggcaattatggctgccgccgcttttgtcgcagccagtacgtttctggatcgagggcggctttgccgtcaccctgacaccgattcagatgttgaatacagccgtcttctgccttctcattctcacaggttcgctttatctcggccgttccgctttcggcaggcgctggaaggccgtgtcggacgatgcctttgccgcctcgctcctgggggtgaacgcgagcaggatatttctgctgtcctattgcgcggcgggtctcgtggcagccatcgccggcgtgctcgccacgttttattacggcaccatggattttggcgccggtctcgtttttggcctgaaagtcgtgctgatctcggcggcgggcggatatgccagcccgctcatctgcggcctgggggcggcagccatcggttttgcggaaacattctgggtcggttacggccccgtcgcctggcgggatgcggcggttcttgccttgctggttggctggctcatcgtcatgcgcagccgggttgaagcagcttag

SEQ ID NO: 465 - protein, 298 aa, Agrobacterium tumefaciens
MAYFLQQLLNAVPVAALYAVLAFGYAIAFSVTKRADVTYGAIFAFAGQTCLLFADFGWNRLWLVLPATLALGAGAGLFGGLWAAGLIGRAVMRPLAKASPNAVTVASIGVLIALTESARLAADTRQLWLPPLLSQPVRFWIEGGFAVTLTPIQMLNTAVFCLLILTGSLYLGRSAFGRRWKAVSDDAFAASLLGVNASRIFLLSYCAAGLVAAIAGVLATFYYGTMDFGAGLVFGLKVVLISAAGGYASPLICGLGAAAIGFAETFWVGYGPVAWRDAAVLALLVGWLIVMRSRVEAA

SEQ ID NO: 466 - DNA, 1035 bp, Agrobacterium tumefaciens
  CDS (1)..(1035)
atggacgcgacaattgccactttcctgatccaggacggcgtcaccaacggcgcgatttatgcgctgctgggccttgccatcgttctggttttctcggtcacgcgggtgatcttcattccgcagggtgagttcgtcgcccatggcgctttgaccctggcgctgctggatgccggccgtgtgccgggcacgctgaacctgctgctgtgcatgggcgtcgtcgctcttgtgctggatctgtgggcaatgcggcgggacatgcgccttccgcgactgttgcaggcgcttgccgtcaaccttgccctgcccggcgcgatttacgggctcgtcgcaattctggcgcccatgcagctcccctcgttcctgcgtgccatgattaccatcgcgatcatcgcgcccatgggatattacgtctatcgcatcgcctaccggccgctttccgatgcttccgttctcgttctgctgattgcctccgtcggtgtgcatctggcgttgatgggcctcgggctcgctttcttcggtccggaaggcctgcgcgcggcggcgctcagtgatggtggtttcacgctggggccaatgctcgttactgcccagagcattttcatctatctcgcgaccatcctcgtcatgatcggtctttacctgtttttcgaaaagacactgctcggcaaggcgctgaaagcaacggcgatcaaccggctcggcgcccgtctcgtcggtgttcgaacggaactcaccggcgtcaccgcctttgtgctggccgcagccatagccgcgatttcgggcgtattgatcgggccaatcacgaccatcttctacgatacgggcttcctcattggtctcaagggttttgtcgctgccattctcggcggcatggcgagctttcccgtcacggcggttgcggcggtgggcgttggactcatcgaggctttcgcctccttttttgctagcgacttcaaggagatcatcgtgttcggcctcatcgtgcccgttttgatctggctttccttcggcgcaagccatcatgaggaagagtga

SEQ ID NO: 467 - protein, 344 aa, Agrobacterium tumefaciens
MDATIATFLIQDGVTNGAIYALLGLAIVLVFSVTRVIFIPQGEFVAHGALTLALLDAGRVPGTLNLLLCMGVVALVLDLWAMRRDMRLPRLLQALAVNLALPGAIYGLVAILAPMQLPSFLRAMITIAIIAPMGYYVYRIAYRPLSDASVLVLLIASVGVHLALMGLGLAFFGPEGLRAAALSDGGFTLGPMLVTAQSIFIYLATILVMIGLYLFFEKTLLGKALKATAINRLGARLVGVRTELTGVTAFVLAAAIAAISGVLIGPITTIFYDTGFLIGLKGFVAAILGGMASFPVTAVAAVGVGLIEAFASFFASDFKEIIVFGLIVPVLIWLSFGASHHEEE

SEQ ID NO: 468 - DNA, 864 bp, Brucella melitensis
  CDS (1)..(864)
atgaatcttttcttacagatcgtcatcaatggcattcttctgggcgggctctatgccatcatggcgcagggcctcgctctggtctggggcgtgctgaacatcgtcaacctcgcccacggcacgatgattatgctgggtggttacgttacctggctggtatttgccaattttggcatcgatccattcatcggcgtatttgcagcagcagccgtgatgttctgtttcggttacgccctgcaacgctgcgtcctcaatcttgtcgcacgcgggccgatgtttaatgcgctgctcatcacattcggcattgaaattatctttacagacgtggcgcaacacgtcttctcggccgattttcgcgctattattccctcctattcggcggtgaatttcaacgtctacggcatcaccatcccgctgatgaacctgctcgccttcatcgcagccttcgtggtttccggcttcatgttctttttcatgatgacgacgaaactcggccgcgccattcgcgccacggcgcaaaacctcaccgcagcacggctttacggtgttgaaccgcgccatctttatgccgtcacctttggcatcggtgtggcaatcgctggtgttgcgggcgggctttacgcaaccgtcaaccagctcaatccctatatcggtgtgccgctgacggccaaaagcttcgcaatcaccatcattggcggcctcgacaatccgctcggcgtcatcctgggtgggctgatcctcggtgtcatcgaatcccttaccgtgctctatctcggcgacacttaccgcaacgtggtcagcttcagtattctcgttctcgtactgatcattcggcccggtgggcttttggggaaaacggcatga

SEQ ID NO: 469 - protein, 287 aa, Brucella melitensis
MNLFLQIVINGILLGGLYAIMAQGLALVWGVLNIVNLAHGTMIMLGGYVTWLVFANFGIDPFIGVFAAAAVMFCFGYALQRCVLNLVARGPMFNALLITFGIEIIFTDVAQHVFSADFRAIIPSYSAVNFNVYGITIPLMNLLAFIAAFVVSGFMFFFMMTTKLGRAIRATAQNLTAARLYGVEPRHLYAVTFGIGVAIAGVAGGLYATVNQLNPYIGVPLTAKSFAITIIGGLDNPLGVILGGLILGVIESLTVLYLGDTYRNVVSFSILVLVLIIRPGGLLGKTA

SEQ ID NO: 470 - DNA, 924 bp, Brucella melitensis
  CDS (1)..(924)
atgggtggcttctctatggaatatttcttccagcaggtgatcaacgggcttgcgctcggttcgatttatggcctgatcgccatcggttatacgatggtctatggcattatcggcatgatcaactttgctcatggcgatatcttcatgctcggcgcgttcatggcgctgattgttttcctcattatcacgaccttcatcggaatgctgccggttgcactgatgctgcttttgatgatgatcgtcgccatgcttctgacgggtctgtggagctgggcgatcgagcgcgtggcctatcaaccgctgcgtggttcgttccgccttgcgccgctgatcacggctatcggcatgtcgattgccttgtcgaacttcgttcaggtcacgcagggtccgcgcaacaagccggttccccagcttctgaatggttcctacgagctgttcggcagcggcggcacgatctcgctcaagcagatcgtggtgatcgtggttacggcaatattgctcacgatcttctggtatgtcgtcaaccgcacctcgctggggcgcgcgcaaagggcttgcgagcaggatcgcaagatggcggcccttcttggcatcaatgtcgaccgtgtcatctcgctcaccttcgtgatgggcgccatgctggcggccgtagccgggacgctttacctctccttctatggcgtgatttcgttcgctgacgggttcatccccggtgtgaaggcgttcacggcggcggttctgggcggcatcggctcgcttccgggggctgttgtcggcgggttgcttatcggtctcatcgaagcgttgtggtcggcctatttctcgatcgactacaaggacgtcgccgcgttctcgatcctggctatcgtgctgatcttcatgccgtccggcattcttggccgacctgacgtcgaaaaggtgtaa

SEQ ID NO: 471 - protein, 307 aa, Brucella melitensis
MGGFSMEYFFQQVINGLALGSIYGLIAIGYTMVYGIIGMINFAHGDIFMLGAFMALIVFLIITTFIGMLPVALMLLLMMIVAMLLTGLWSWAIERVAYQPLRGSFRLAPLITAIGMSIALSNFVQVTQGPRNKPVPQLLNGSYELFGSGGTISLKQIVVIVVTAILLTIFWYVVNRTSLGRAQRACEQDRKMAALLGINVDRVISLTFVMGAMLAAVAGTLYLSFYGVISFADGFIPGVKAFTAAVLGGIGSLPGAVVGGLLIGLIEALWSAYFSIDYKDVAAFSILAIVLIFMPSGILGRPDVEKV

SEQ ID NO: 472 - DNA, 927 bp, Yersinia pestis
  CDS (1)..(927)
atgtcagagcagtttttatattttctgcagcagatgttcaacggtattacgttgggcagcacttatgcgctgatcgccattggttataccatggtgtacggcattatcggcatgatcaactttgctcacggcgaagtatatatgatcagcagttacgtctcatttatcgtgatcgccgcattaatgatggtggggatcgatgccagttggctgttgattggttgcgctttcctagtgtcgattgtgatcgccagtacttacggctggagcattgaacgggtagcctataagccagttcgtcgctctaagcgcctgatcgcgctgatttcggcgatcggcatgtctattttcctacagaactatgtcagcttgacgcaaggttcacgggatttggcattacccagtctggtcaccgggcagtggaccttaggtgagagtaatggctttgctgcgacgatcagcaccatgcagctgacgatttggattgtcaccttcttggccatgttggcgctgactctgtttatccgttattcacgaatgggccgtgcttgccgcgcctgtgccgaagatttgaaaatggccagtttactgggcattaacactgaccgggttatctcgctgacttttgtgattggcgcactgatggccgctgtcgcgggtgtgttactcggccagttctacggggtgatcaatccctatattggctttatggcagggatgaaagcattcactgccgcagtattaggcggtattggcagtattccgggcgcaatgattggtggtttggttctcggtgtggctgaagcactgacctccgcttatctcagcactgaatacaaagatgcggtttcattcgcgctgctgattgtggtgttgttagtgatgcctaccgggattttaggccgtccggaggttgaaaaagtatga

SEQ ID NO: 473 - protein, 308 aa, Yersinia pestis
MSEQFLYFLQQMFNGITLGSTYALIAIGYTMVYGIIGMINFAHGEVYMISSYVSFIVIAALMMVGIDASWLLIGCAFLVSIVIASTYGWSIERVAYKPVRRSKRLIALISAIGMSIFLQNYVSLTQGSRDLALPSLVTGQWTLGESNGFAATISTMQLTIWIVTFLAMLALTLFIRYSRMGRACRACAEDLKMASLLGINTDRVISLTFVIGALMAAVAGVLLGQFYGVINPYIGFMAGMKAFTAAVLGGIGSIPGAMIGGLVLGVAEALTSAYLSTEYKDAVSFALLIVVLLVMPTGILGRPEVEKV

SEQ ID NO: 474 - DNA, 867 bp, Nostoc sp. PCC 7120
  CDS (1)..(867)
atggacatacaaacgattcaactgattgtcaatggtattgctgtaggtagtattatcgctcttgcagctgtgggactgactttaacttatggaattttacggttgtctaattttgcccacggtgatttcttaactttaggggcttatctgactttttttgtcaacacttttggggtaaatatttggttatcgatgatagtggcagtagtgggaacggtgggagtaatgttactgtcagaaaaattgctatggtctagaatgcgctcgattcgagctaattccactactcttattattatctcaattgggctggcattattcctgcgtaacgggattattttaatttggggtggcaggaaccaaaattataatttacccatcacccccgccttagatattttcggagtgaaagtaccacaaaatcaattgctggtgttggcattggcagtattatccatcggcgcactgcactacctcttacaaaacacaaaaattggtaaggcgatgcgtgctgttgctgacgatttggatttagccaaggtttcaggtattgatgtagagcaagtaattttttggacttggctaattgccggcacagtcacctctttaggtggcagtatgtatggcttaattacggcagtgcgtcccaatatgggttggttcttgattctgccgctattcgcttctgtaatcttgggcggtattggcaacccttacggtgcgatcgccgcagcttttatcattggtattgttcaagaagttagtacacccttcttaggttcccaatacaaacaaggtgtagccctactaatcatgattttggtgttgctcattcgtcctaaaggtttatttaaaggcacgatgtga

SEQ ID NO: 475 - protein, 288 aa, Nostoc sp. PCC 7120
MDIQTIQLIVNGIAVGSIIALAAVGLTLTYGILRLSNFAHGDFLTLGAYLTFFVNTFGVNIWLSMIVAVVGTVGVMLLSEKLLWSRMRSIRANSTTLIIISIGLALFLRNGIILIWGGRNQNYNLPITPALDIFGVKVPQNQLLVLALAVLSIGALHYLLQNTKIGKAMRAVADDLDLAKVSGIDVEQVIFWTWLIAGTVTSLGGSMYGLITAVRPNMGWFLILPLFASVILGGIGNPYGAIAAAFIIGIVQEVSTPFLGSQYKQGVALLIMILVLLIRPKGLFKGTM

SEQ ID NO: 476 - DNA, 951 bp, Nostoc sp. PCC 7120
  CDS (1)..(951)
atggatattagtgtatttttacaacaattattgaatgggttatctattggcagcgtttatgcaatctttgccttaggttatacattggtttattccattttgggaattattaatttagcacatggggcaatttttactctgggagcatattttacttatgctcttatgggtggaacctttgggtttaatggtttgctggctaacgctactttgccgatacaattaccatttgctatggcattgattatgggtagtagtttagctggtttagtgggagtagcaatggaaagaattgcttttcaacctttacgaaaaaaaggatctgacaccttactaactgtggtttctagcttaggggtagcagtggtaattgtgaacctaattcaatatttagtaggtgcagaaagttatacatttccagcaaatacttttgggaatttacccccagcgtttaactttggaactttggaaaaaccgattcctattcgtagcgtacaggtggtaatttttactgtatctgttgtgattgtggctattcttacttactttattaatcgtactaaatacggtaaagcaattcaggcgatcgccgaagatgccactactgctagtttattaggtatcaatagcgatcgctttattgtcttaactttttttatcagcagttttctcgctggcttggcgggtacattagtcgcttctagtgtaagcattgcaggcccttattttgggattggctttgggttgcggggtttagcggtgattgttttgggtggcttaggtagcattcctggcgcagtgctgggaggtttactgattggtgtggttgaggcgctggttccctctgattactctggttataaagacgctgtagctttcggcattttgtttatcatgctattagttagaccccaaggattattaggtcgtcggtttattcagaaagtctga

SEQ ID NO: 477 - protein, 316 aa, Nostoc sp. PCC 7120
MDISVFLQQLLNGLSIGSVYAIFALGYTLVYSILGIINLAHGAIFTLGAYFTYALMGGTFGFNGLLANATLPIQLPFAMALIMGSSLAGLVGVAMERIAFQPLRKKGSDTLLTVVSSLGVAVVIVNLIQYLVGAESYTFPANTFGNLPPAFNFGTLEKPIPIRSVQVVIFTVSVVIVAILTYFINRTKYGKAIQAIAEDATTASLLGINSDRFIVLTFFISSFLAGLAGTLVASSVSIAGPYFGIGFGLRGLAVIVLGGLGSIPGAVLGGLLIGVVEALVPSDYSGYKDAVAFGILFIMLLVRPQGLLGRRFIQKV

SEQ ID NO: 478 - DNA, 903 bp, Agrobacterium tumefaciens
  CDS (1)..(903)
atggagtattttatccagcagctcatcaacgggctgactcttggatcgatctatggcctcatcgctatcggctacacgatggtttacggcatcatcggcatgatcaacttcgcccatggcgatattttcatgcttggcggctttgccgcgctgatcgtatttctgatcgcaacatcgtttttcgccggcattccggtggcgcttcttctgcttttgatgatgatcgtcgccatgctgatgaccggcctgtggaactgggtgatcgagcgtgttgcctaccgcccgctcagaggttccttccgccttgcgccgctgatcactgccatcggcatgtcgatcgcgctgtccaacttcattcaggtcacccagggcccgcgcaacaagccgatcccgtcgatggtgacggaaagctatcatttcggcgccatcaccgtgtcgctgaagcagctgatcatcatggtcgttacctcggtactgcttttcgccttctggtatatcgtcaacaagaccccgctcggccgggcgcagcgcgccaccgagcaggaccgcaagatggccgcccttttgggggttgatgtggacaagacgatttccatcaccttcatcatgggtgcggcgctggctgcggtcgcgggcaccatgtatctgatgtattacggtgttgcttcgttcagcgacggcttcgttcccggcgtcaaggccttcaccgcggccgtcctcggcggcatcggctcgcttccgggcgccgttcttggtggcctgctgatcggtctcatcgaatcactgtggtcggcctatttctccattgcctacaaggatgttgcggcattcggcatcctggcattcgtgctgatcttcaagccgaccggtattctcggtcgtccggaagtcgagaaggtgtga

SEQ ID NO: 479 - protein, 300 aa, Agrobacterium tumefaciens
MEYFIQQLINGLTLGSIYGLIAIGYTMVYGIIGMINFAHGDIFMLGGFAALIVFLIATSFFAGIPVALLLLLMMIVAMLMTGLWNWVIERVAYRPLRGSFRLAPLITAIGMSIALSNFIQVTQGPRNKPIPSMVTESYHFGAITVSLKQLIIMVVTSVLLFAFWYIVNKTPLGRAQRATEQDRKMAALLGVDVDKTISITFIMGAALAAVAGTMYLMYYGVASFSDGFVPGVKAFTAAVLGGIGSLPGAVLGGLLIGLIESLWSAYFSIAYKDVAAFGILAFVLIFKPTGILGRPEVEKV

SEQ ID NO: 480 - DNA, 924 bp, Pseudomonas aeruginosa
  CDS (1)..(924)
atgcccgagatttatcattacctacaacaattggttaacggcctgaccgtcggcagcacctatgcgctgatcgcgatcggctacaccatggtctacggcatcatcggcatgatcaacttcgcccacggcgaggtgtacatgatcggctcgtacatcgccttcatcgccatcaccctgctggcgatgatggggctggacagcgttccgctgatgatgctcgccgcattcgccgccagcatcatcgtcaccagtgctttcggctacagcatcgagcgggtcgcctaccgcccgttgcgcggcggcaaccgcctgatcccgctgatctccgcgatcggcatgtcgatcttcctgcagaacgccgtgatgctctcgcaggactccaaggaaaaggccatcccgaccctgctgcccggcaacttcgtgttcggcgaaagcagcatgaacggcgtggtgatctcctatatgcagatcctgatcttcgtcgtcaccttcctggtgatgttcggcctcaccctgttcatctcccgttcccgcctgggccgcgcctgccgcgcctgcgccgaggacctgaagatgaccaacctgctgggtatcaacagcaacaacatcatcgccctcaccttcgtcatcggcgccgccctggccgccgtcgccgcggtgctgctgggcatgcagtacggcgtgatcaaccccgggatcggcttcctcgccgggatcaaggcgttcaccgccgcggtgctcggcggcatcggtagcatccccggcgccatgctcggcggcctgctgctgggcgtcgccgaagccttcggcgccgacgtgttcggcgaccagtacaaggacgtggtggccttcggcctgctgatcctggtgctgctgttccgacctaccggcatcctcggtcgtccggaggtggaaaaagtatga

SEQ ID NO: 481 - protein, 307 aa, Pseudomonas aeruginosa
MPEIYHYLQQLVNGLTVGSTYALIAIGYTMVYGIIGMINFAHGEVYMIGSYIAFIAITLLAMMGLDSVPLMMLAAFAASIIVTSAFGYSIERVAYRPLRGGNRLIPLISAIGMSIFLQNAVMLSQDSKEKAIPTLLPGNFVFGESSMNGVVISYMQILIFVVTFLVMFGLTLFISRSRLGRACRACAEDLKMTNLLGINSNNIIALTFVIGAALAAVAAVLLGMQYGVINPGIGFLAGIKAFTAAVLGGIGSIPGAMLGGLLLGVAEAFGADVFGDQYKDVVAFGLLILVLLFRPTGILGRPEVEKV

SEQ ID NO: 482 - DNA, 798 bp, Aeropyrum pernix
  CDS (1)..(798)
atgggtcttgccatgatctggggcgttatggagatcattaacttcgcgcatggcgattttatgatgcttggagctctggcagcctactatgcgttcacgctaatggggttagaccccttggctggtggtgtattagcgtttgtaatggtgttcgcactgggtgtgggggtgcagcgcggcgttataaataggatattagatgctccgttattgacgcagatagccgctacattcgctgtcctccttataatacggtatggggtgcaggctgtcctgggcccctacactaggaggcttgtcacgtggtatcaggactattacgtggggctgggattcactactgtacccctctctaagcttcttatattcctggtatcactcgtcatattggccctactatatatattgctgaacaggactgacatggggatagccattagggctacatcacagaataggatggtggcgcagctgatgggaataaatgtatctagggtttacgacgtaaccttcgggattggtgtcggtgtagctgcagtagggggcgccctggtagcgttgttctacccaatattccctgagatggggggattcttcgcgttaatagcatttatagcggtcgtcctcggaggctttggcaacgtgtatggagcctatgtgggaggtttgattataggcgttacggagagtgttagcgcgttatttatagagcccgcattgaaggatgtagtagccttcctactattcatactcatcataatgattaagccgacaggattatttggtaggggtgaatga

SEQ ID NO: 483 - protein, 265 aa, Aeropyrum pernix
MGLAMIWGVMEIINFAHGDFMMLGALAAYYAFTLMGLDPLAGGVLAFVMVFALGVGVQRGVINRILDAPLLTQIAATFAVLLIIRYGVQAVLGPYTRRLVTWYQDYYVGLGFTTVPLSKLLIFLVSLVILALLYILLNRTDMGIAIRATSQNRMVAQLMGINVSRVYDVTFGIGVGVAAVGGALVALFYPIFPEMGGFFALIAFIAVVLGGFGNVYGAYVGGLIIGVTESVSALFIEPALKDVVAFLLFILIIMIKPTGLFGRGE

SEQ ID NO: 484 - DNA, 885 bp, Aeropyrum pernix
  CDS (1)..(885)
atggccggcctcctggagcagtgggggaacctggttttccagggcgtcctcatggggctcctatactccctcatagccctaggctacaacatcgtctacagggtcaacaagtccataaacttcgcagtacccgaggttgtgctactagcagcctacctggcttggatagcctcgatagccacgggcaacctcctggcggctgtggccatagctctagccgccagcatcgccgtcagcatggccatggagaggttcgtcgcgaagcctctgctaggccgtccccccatagccttgattggagcaaccctgggactattctacatgcttaagggtgttgtcctaatagttggaaagggcgaggtcgcggtactccccttctaccccgaagtgtacaggctgggcttcctgacgctcggcacaaacgatgttatagcccttctaggctcgatagccgtgctagccggcatcatcgtcctccataggaaaactagcttcggcgctgctatgaggggtgtggcggaggacgcagagggcgcagccgcctacgggctccctgtgaggaggctcatgctggccggctgggctcttgccggcctcgtgagcggcctcgcagccctcctcctctcaatcaaaacacaggtgtcgccggacctcgagttcttcgcgataatagccctagcagctagccttatagcgggtctcgacagcctgggaggaatagtcgtgggaggcgtcttcctcggcctggccgagcagatagccagcaaaactctggacccctacctgcccggtatagggagggatatcgcgttcttcatactattcctagtactcctagtcaagccctacggcctcttcggcagtgagaggatagagaggctctag

SEQ ID NO: 485 - protein, 294 aa, Aeropyrum pernix
MAGLLEQWGNLVFQGVLMGLLYSLIALGYNIVYRVNKSINFAVPEVVLLAAYLAWIASIATGNLLAAVAIALAASIAVSMAMERFVAKPLLGRPPIALIGATLGLFYMLKGVVLIVGKGEVAVLPFYPEVYRLGFLTLGTNDVIALLGSIAVLAGIIVLHRKTSFGAAMRGVAEDAEGAAAYGLPVRRLMLAGWALAGLVSGLAALLLSIKTQVSPDLEFFAIIALAASLIAGLDSLGGIVVGGVFLGLAEQIASKTLDPYLPGIGRDIAFFILFLVLLVKPYGLFGSERIERL

SEQ ID NO: 486 - DNA, 1065 bp, Aeropyrum pernix
  CDS (1)..(1065)
atggttgacgttaaggtagtgtttgacatgctcgcatactcgggggtcatagcactcctgagcctgggcataacgcttgcatacataacaaccagggtgttcaacttcgcccacccaaggatagccaacgtgggggcctatgcggccgccgcctccatggcactctatgtggacctggtgcgtgacgagggtataggccggtttaaagtctcgctaggccccctcgaggttacagggctggtggcgcccgacgttctagccgtcgggatagtgttcgcggtcatagccgggattatcactgcgctagccgaatactacctcgtcctcaggcccctgatagagaggggcgccgacttcctgaagcttatgatagcaacacttgctttcgacttcttcgtcatagcaacactgttcatcctcgggacacacatatccgtcaaggagctggtcagcggagtcttcggaagggagaccacaagcctttctctacacgccttcgacgccagaatcgacctagccgtgctaggctataagctgagagggattatgctgttctccttcctaggaagcctagccatagccctaatgctctacatactactcttcaagaccaagctgggcgtaaagatgagggcctccatagagaacccctccctggccgaggtcctcggcataaacgtgcagcaggtgtacactatagcctggataataagcggggccacggcagggttcgccgggttccttatactgttcatgggcgacatcgtgaagcccgtgacagcgtcgagcccggccgacgagataatagtgagcgccttcgcaggcagcatagttggcggggtcaacagcgtgttcggctccatagggggaggcttcataataggcgctgtggagatactgatatcctcagttataacagacgtcactggcatagacgttaccagatacaacaagatgctctcgatgctggcagtagccctgaccctactcttcgcgccgcagggactggccgctctatactccgaaaagattcaggccaggcttcccaggctgaggggaggctag

SEQ ID NO: 487 - protein, 354 aa, Aeropyrum pernix
MVDVKVVFDMLAYSGVIALLSLGITLAYITTRVFNFAHPRIANVGAYAAAASMALYVDLVRDEGIGRFKVSLGPLEVTGLVAPDVLAVGIVFAVIAGIITALAEYYLVLRPLIERGADFLKLMIATLAFDFFVIATLFILGTHISVKELVSGVFGRETTSLSLHAFDARIDLAVLGYKLRGIMLFSFLGSLAIALMLYILLFKTKLGVKMRASIENPSLAEVLGINVQQVYTIAWIISGATAGFAGFLILFMGDIVKPVTASSPADEIIVSAFAGSIVGGVNSVFGSIGGGFIIGAVEILISSVITDVTGIDVTRYNKMLSMLAVALTLLFAPQGLAALYSEKIQARLPRLRGG

SEQ ID NO: 488 - DNA, 1047 bp, Deinococcus radiodurans
  CDS (1)..(1047)
atgcgtcggccgtccggcggcagcgctcccggtgggcgctcgccccgggcggccccgacgttgggggtggcaatggaacccagtcagctgatccagaatctggtcaacggcctggcgatcggcagcgtctacgcgattttcgcgctgggctacacgctgatcttctcgattctgggcatcatcaatttcgcgcagggggccgtgtttacgctgggcgcctacctgacctacaccctggtgtcggggcagttcgagaacaacgggctgctcaagggcatcaatctctttcccgacggctcaccgctggcaggcaatccctgggcctttgggctcgccaccctgctcggctcggcgctggcgggtttgatcgcggtggtgatcgagcgcctcgccttccggcccatgcgggcgcgcggggccgagccgctgctggcgctggtgagcagcctgggggtggcgctggtgatcgtcaacctcattcaactgctcgtcggcgccgagagctacagcttcccggccaatgcctacggcgagtttccgcccgcgctgacctttcatgtgggcgacaaggtggtggcggtccgcaccgtgcaactggtgattttcgccgtcagcatggtgatgctgggcattctgggctacgtcatcgggcgcaccaagatcggcaaggcgttgcgggcggtggccgaaaatcccggcacggcgagcctgctcggcatcagcgtggaccgctacgtgctgatcacttttttcctctcgggctttttgggtgggctggcgggcacgctggtgtcgctggcgttcggcatcggcgggccgtacttcgggcaggccttcgggctcaaggggctggcggtcatcgtgctcggcgggctgggcagcattcccggcgcggtgctcggcggtctggtgatcggcctggccgaggcgttcgtgcccgccgactacagcgcctacaaggacgcggtggccttcgcgctgctgtttatcgtgctgctgctgcggccccaggggctgctcggcaaggcccaggttcagaaggtgtga

SEQ ID NO: 489 - protein, 348 aa, Deinococcus radiodurans
MRRPSGGSAPGGRSPRAAPTLGVAMEPSQLIQNLVNGLAIGSVYAIFALGYTLIFSILGIINFAQGAVFTLGAYLTYTLVSGQFENNGLLKGINLFPDGSPLAGNPWAFGLATLLGSALAGLIAVVIERLAFRPMRARGAEPLLALVSSLGVALVIVNLIQLLVGAESYSFPANAYGEFPPALTFHVGDKVVAVRTVQLVIFAVSMVMLGILGYVIGRTKIGKALRAVAENPGTASLLGISVDRYVLITFFLSGFLGGLAGTLVSLAFGIGGPYFGQAFGLKGLAVIVLGGLGSIPGAVLGGLVIGLAEAFVPADYSAYKDAVAFALLFIVLLLRPQGLLGKAQVQKV

SEQ ID NO: 490 - DNA, 918 bp, Pseudomonas aeruginosa
  CDS (4)..(918)
aaaatggacggcatcttcctccagcaaatgatcaacgggctgaccctcggctcggtctacggcctcatcgccatcggctacaccatggtctacggcatcatcggcatgatcaacttcgcccacggcgaggtgtacatgatctccgcctacctgtcggccatcgcccttgccctgctggccttcttcggcctgcagaacttcccgctgctgatcctcggcaccttgctgttcaccgtgctggtgacctgcacctacggctgggtgatcgagcgcatcgcctacaagccgctgcgcaactccacgcgcctggcgccgctgatctcggcgatcggcatgtcgctgatcctgcagaactacgtgcaggtggcgcagggaccgcgccagcaggggatcccgaccctgctcgacggcgccctgaaattccacgtcggcgacggtttcgtccagctcacctacaccaagctgttcatcctgatcgcttcgctgatcggcatggcggtgctgacctacgtgatccgctacaccaagctcgggcgcatgtgccgggcgacccagcaggaccgcaagatggcttcgatcctggggatcaacaccgaccgggtgatctcctacgtgttcgtcatcggcgcagcgatggccgccctggccggggtgctgatcaccatgaactacggcaccttcgacttctacgccggcttcatcatcggcatcaaggcgttcaccgcggcggtgctcggcggcatcggctcgctgcccggggcgatgctcggcggcctggtgctgggagtggccgaggcgcagttctcggggatggtcaacaccgactacaaggacgtgttcgccttctcgttgctggtactgatcctgatcttccgtccccagggcctgctcggccgcccgcagatcgccaaggtgtaa

SEQ ID NO: 491 - protein, 304 aa, Pseudomonas aeruginosa
MDGIFLQQMINGLTLGSVYGLIAIGYTMVYGIIGMINFAHGEVYMISAYLSAIALALLAFFGLQNFPLLILGTLLFTVLVTCTYGWVIERIAYKPLRNSTRLAPLISAIGMSLILQNYVQVAQGPRQQGIPTLLDGALKFHVGDGFVQLTYTKLFILIASLIGMAVLTYVIRYTKLGRMCRATQQDRKMASILGINTDRVISYVFVIGAAMAALAGVLITMNYGTFDFYAGFIIGIKAFTAAVLGGIGSLPGAMLGGLVLGVAEAQFSGMVNTDYKDVFAFSLLVLILIFRPQGLLGRPQIAKV

SEQ ID NO: 492 - DNA, 954 bp, Pseudomonas aeruginosa
  CDS (1)..(954)
atgcgcatcgccgccgccaccagcctggcccaggtcaagcgccggctgctggtcggcgacctgctcggccaggccttcagtggcctgtcgctgggctcgatcctgctgctcgcggcgctcggcctggcgatcacctacggcctgctcggggtgatcaacatggcccacggcgaaatgctcatgctcggcgcctactccacctacgtggtgcaactgctgttccagcgcctggcgccggaatggctggcgctctacccgttgctggcgctaccggtggcgttctgcgtcagcgccgccatcggcatggccctggagcgcacggtgatccgccatctctacggccggccactggaaaccctgctcgccacctggggcatcagcctggtgctgatccaactggtgcggatgctgttcggcgcgcagaacgtcgaggtagccaacccggcctggctgtccggcggcatccaggtgctgccgaacctggtgctgccgtggaaccgtatcgtcatcatcggcttcgccctgttcgtgctgctcctcacctggctgctgctgaaccgcacgcggctcggcctgaacgtccgcgcggtgacccagaaccgcaacatggcggcctgctgcggggtgcccacagggcgcgtggacatgctcgccttcggtctcggctcgggcatcgccgggctcggcggggtagccctgtcgcaggtcggcaacgtcggcccggacctcggccagggctacatcatcgactccttcctggtggtggtgctcggcggcgtcggccagctcgccggcagcgtcctcgccgccttcggcctcggcgtggcgaacaagatcctcgaaccgcagatcggcgcggtgctgggcaagatcctgatcctcgcgctgatcgtcctgttcatccagaaacgcccgcagggactgttcgccctgaaagggagggtcatcgattga

SEQ ID NO: 493 - protein, 317 aa, Pseudomonas aeruginosa
MRIAAATSLAQVKRRLLVGDLLGQAFSGLSLGSILLLAALGLAITYGLLGVINMAHGEMLMLGAYSTYVVQLLFQRLAPEWLALYPLLALPVAFCVSAAIGMALERTVIRHLYGRPLETLLATWGISLVLIQLVRMLFGAQNVEVANPAWLSGGIQVLPNLVLPWNRIVIIGFALFVLLLTWLLLNRTRLGLNVRAVTQNRNMAACCGVPTGRVDMLAFGLGSGIAGLGGVALSQVGNVGPDLGQGYIIDSFLVVVLGGVGQLAGSVLAAFGLGVANKILEPQIGAVLGKILILALIVLFIQKRPQGLFALKGRVID

SEQ ID NO: 494 - DNA, 894 bp, Bacillus halodurans
  CDS (1)..(894)
atgatcgtacaactttttaacggtataagcttaggctccattcttcttttaatcgctcttgggcttgccataacgttcggaatgatgcgagtcattaacatggcacacggggaattaattatggttggagcctatgctacttacgttgttcagcttctttttagtcaatatgttcctccggcttattttgatctttactttttactcgcagtcccgttatcgtttgtcatttcagctcttatcggtattctcattgaacttaccgttattcgccacttatacggccgacctctagatagtttattagccacgtttggtgttggactcatcttgcaacaaacagcgcggacaatctttggggcaccaaatgtaggcgtccaaagcccatcgtttttacgtggcgggctagagattgccggagtgacactccctttctctcggttgtttattatcactctcgtcctcgtaagcttttgtttgttagcctggtttttttataaaactcggaatggccgaaaaattcgcggggtgatgcaaaaccggagcatggccacatgtttagggatctctacacgcaaagtggatgtgatgacatttgcgattggttctggttgtgctggtttagctggtgctgcactgacgctgttagggccgatcgggccaaccatcggtacctattatattgtagatgcctttatggtcgtcgttgttggcggggtcggcatgttagtaggaacggtggctggtgcgttaggaatcgggatgtttaacaccttatttgaatattggacgaatgcctctttaggaaaagtactcgtctttgcctgcatcattctctttttacaatggcgcccgcaaggcttgttttccttaccaactcgttctttagattaa

SEQ ID NO: 495 - protein, 297 aa, Bacillus halodurans
MIVQLFNGISLGSILLLIALGLAITFGMMRVINMAHGELIMVGAYATYVVQLLFSQYVPPAYFDLYFLLAVPLSFVISALIGILIELTVIRHLYGRPLDSLLATFGVGLILQQTARTIFGAPNVGVQSPSFLRGGLEIAGVTLPFSRLFIITLVLVSFCLLAWFFYKTRNGRKIRGVMQNRSMATCLGISTRKVDVMTFAIGSGCAGLAGAALTLLGPIGPTIGTYYIVDAFMVVVVGGVGMLVGTVAGALGIGMFNTLFEYWTNASLGKVLVFACIILFLQWRPQGLFSLPTRSLD

SEQ ID NO: 496 - DNA, 1254 bp, Pseudomonas aeruginosa
  CDS (1)..(1254)
atgagccagtccctcaagcgcgcgctgttcagcgccctcctcgtgatcctggtgtcctatccgatcctaggcctgaagctgcgcaccgtcggcatcaagctcgaggtcctcggcgccgatgcgcagaccctctggaccatcgccgcggccgccctggccatgttcgtctggcagctgttccgcgaccgcatcccgctcaagctgggtcgcggcgtcggctacaaggtcaacggcagcggcctgaagaacttcctcagcctgccatcgacccagcgctgggcggtcctcgccctggtcgtggtggctttcgtctggccgttcttcgcctcgcgcggggcggtggacatcgccaccctgatcctgatctacgtgatgctcggcatcggcctgaacatcgtggtcggcctggccggcctgctcgatctcggctacgtcggcttctacgcggtaggtgcctacacctacgcgctgctcgccgagtacgccgggttcggcttctggaccgccctgccgatcgccgggatgatggccgcgctgttcggcttcctcctcggcttcccggtgctgcgcctgcgcggcgactacctggcgatcgtgaccctcggcttcggcgagatcatccgcatcctgctgcgcaacatgaccgagatcaccggcggccccaacggcatcggctcgatccccaagccgaccctgttcggcctgaccttcgaacgccgcgcgccggaaggcatgcagaccttccacgagttcttcggcatcgcctacaacaccaactacaaggtcatcctgctctacgtggtggccctgctgctggtgctgctggccctgttcgtgatcaaccggctgatgcgcatgccgatcggtcgcgcctgggaagcgctgcgcgaggacgaagtggcctgccgcgctctcggtctcaacccgaccatcgtcaagctctccgccttcaccatcggcgccagcttcgccggtttcgccggcagcttcttcgccgcccgccagggcctggtgacgcctgagtccttcaccttcatcgagtcggcgatgatccttgcgatcgtcgtgctcggcggcatgggttcgcagctcggcgtgatactcgccgcggtggtgatggtgctgctccaggaaatgcgcgggttcaacgaataccgcatgctgatcttcggcctgaccatgatcgtgatgatgatctggcgtccccagggactgctgccgatgcaacgcccgcacctggagctgaagccatga

SEQ ID NO: 497 - protein, 417 aa, Pseudomonas aeruginosa
MSQSLKRALFSALLVILVSYPILGLKLRTVGIKLEVLGADAQTLWTIAAAALAMFVWQLFRDRIPLKLGRGVGYKVNGSGLKNFLSLPSTQRWAVLALVVVAFVWPFFASRGAVDIATLILIYVMLGIGLNIVVGLAGLLDLGYVGFYAVGAYTYALLAEYAGFGFWTALPIAGMMAALFGFLLGFPVLRLRGDYLAIVTLGFGEIIRILLRNMTEITGGPNGIGSIPKPTLFGLTFERRAPEGMQTFHEFFGIAYNTNYKVILLYVVALLLVLLALFVINRLMRMPIGRAWEALREDEVACRALGLNPTIVKLSAFTIGASFAGFAGSFFAARQGLVTPESFTFIESAMILAIVVLGGMGSQLGVILAAVVMVLLQEMRGFNEYRMLIFGLTMIVMMIWRPQGLLPMQRPHLELKP

SEQ ID NO: 498 - DNA, 936 bp, Agrobacterium tumefaciens
  CDS (1)..(936)
atgtcgggccgccaagagcggcccgtctccggcccggatgggcatcgctgcaccgggaggagttttttcagcatgcagacggtcttcagcatcctcatcgatgcgcttgcctatggcatggtcctgttcatcatctccatcggcctttccgtcacaatggggctgatgcgggtggtcaatctggcacacggcgcgttcgcgatgatcggcggttatctcgcgtcttatgccgcccacggcctcggccttggttatgcgatggcgatcctcgttgcgattgtcggcaccatcgtcatcgccataccgctcgaacgtttcctctatcgccgcatctatggcgcgccagagctgacgcaggtgctgatgaccatcggcatcaccttctgcatcatcggcatcgccaattacgtcttcggccccacattgaagaccattcctctgccgcagcagctcgccggccccaccgatctcggcttccgcaccatcgccacccatcgcatcttcgccattgcctgcgggctggccgtggccggcgcgctgtggttcaccttcgaaaagaccgccttcggtatcaagctgcgtgccgccgtcgataatgccgccatggcggcggcactcggcgtgcgcacggaaatcatctatgccgtcagctttgccatcgccgtcggccttgccgcgatgggcggcgtcatcggcgcggaactgctgccggtcgaaccctattacgcgctgcgctacatggtcaccttcctcgtggtggtttcggtcggcggcgcgggctccatacccggcgcgctgatcgcctgcctgctgctcggcgcgatcgatacgaccgggcggtatctcgccccggaatatggcgagttcttcttttatctggcggtcatcgtgatcatcaccttgttcccgcgcggccttctcggaagggcgaaatga

SEQ ID NO: 499 - protein, 311 aa, Agrobacterium tumefaciens
MSGRQERPVSGPDGHRCTGRSFFSMQTVFSILIDALAYGMVLFIISIGLSVTMGLMRVVNLAHGAFAMIGGYLASYAAHGLGLGYAMAILVAIVGTIVIAIPLERFLYRRIYGAPELTQVLMTIGITFCIIGIANYVFGPTLKTIPLPQQLAGPTDLGFRTIATHRIFAIACGLAVAGALWFTFEKTAFGIKLRAAVDNAAMAAALGVRTEIIYAVSFAIAVGLAAMGGVIGAELLPVEPYYALRYMVTFLVVVSVGGAGSIPGALIACLLLGAIDTTGRYLAPEYGEFFFYLAVIVIITLFPRGLLGRAK

SEQ ID NO: 500 - DNA, 948 bp, Methanococcus jannaschii
  CDS (1)..(948)
atggtcaagcttttactaaaagatttaggtgagaaaatgattttagaaggagctattatatactccaaccttttggttttgttggctttgggattaactctaacttatataacaacaaacgttccaaactttgctcagggaagttatgcgatagttgggagttatgttgctttaacattattaaagttgtttggtatttgtccttatctttctttaccagttttatttgttgttggggcaattgttggtttaataacttatttagctttaaagcccttgataaaaagaaatgcctctgtagagattttaatgattgcaactcttgctatagatttaatattattgggtgttattggggcttactctgaaatattaagtcaaattgttggttctactcaagcaaaattcgtttttgcaaacttggatttttcattatttggatttaaaggaattttatttgtttcaaccttcgtagttatactactattaattggactttatctcctcctgtataaaacaaagtttggtattgctttgagagcttcaatggagaatccttcattagctcaaactatgggaattgatgttgaaaaaacaagattattttcttggattctttctggagctttagctggagttgctggtgggcttttacctttcatgcaagagattgttccagccactggggatttaattattatttcaatctttgcggcaagtattgttggaggtttaaggcatataagtggagcattaatagggggctatataattggaatatctgagagtttaataacttattatttagcatcagcatttggaacaggatttttggtttatggaaaggttatctccttaataataatgatagcaacattattaatagcaccttatggaattactggagtcgattggaaaaagttaaaaagattattatctacttcataa

SEQ ID NO: 501 - protein, 315 aa, Methanococcus jannaschii
MVKLLLKDLGEKMILEGAIIYSNLLVLLALGLTLTYITTNVPNFAQGSYAIVGSYVALTLLKLFGICPYLSLPVLFVVGAIVGLITYLALKPLIKRNASVEILMIATLAIDLILLGVIGAYSEILSQIVGSTQAKFVFANLDFSLFGFKGILFVSTFVVILLLIGLYLLLYKTKFGIALRASMENPSLAQTMGIDVEKTRLFSWILSGALAGVAGGLLPFMQEIVPATGDLIIISIFAASIVGGLRHISGALIGGYIIGISESLITYYLASAFGTGFLVYGKVISLIIMIATLLIAPYGITGVDWKKLKRLLSTS

SEQ ID NO: 502 - DNA, 900 bp, Thermotoga maritima
  CDS (1)..(900)
atggtattctttctccagaatctcttcaacggaatcatgctcggaggtttgtacgcgctcatagcgattggttacaccatggtttatggtattctgaggctcatcaatttcgcccatggcgatgttatgatgatgggtgtctacttcgccttctacgctgctactcttctttctctgaatccacttttttctgccatcgtagcgatcctcggagcagcgctattgggttttctcatagacagagttgcttacaaacctctgagaaacgctcccaggatttccgctcttatcaccgctatcggagtttctttcttccttgagagtctcgctgtggtcgtttttggagccattcccaagtcttttctgaaggtcttcaaggacaggaccatactgaacaaagtgctgactgtagcgggagccagaataccactcctcacgttcctcgtgatcttcatcaccgccgtcattctgatagtcctgttcttcatcgtttatagaacgaagatcggtatggctatgagagcgatttccatggatattccaacgactgccctcatgggtgtcaacgtggacgccgtcatcggtttcacgtttgccctcggttcggcactcgctgctgcgagtgggatcatgtgggcaatgagatttccgaacgtacatccttacatgggtttcatgccaggtctcaaggctttcattgcggcggtgtttggaggaataggttcgatccccggagctgttctcggtggcgttcttctcggtctcattgagatattcctcgcagcttatttcccagctgttatgggttaccgggatgcgttcgctttcatcatcctgatcatcatactgctcgtgaaaccttctggacttctcggtaaaaaaatcgtggaaaaggtgtga

SEQ ID NO: 503 - protein, 299 aa, Thermotoga maritima
MVFFLQNLFNGIMLGGLYALIAIGYTMVYGILRLINFAHGDVMMMGVYFAFYAATLLSLNPLFSAIVAILGAALLGFLIDRVAYKPLRNAPRISALITAIGVSFFLESLAVVVFGAIPKSFLKVFKDRTILNKVLTVAGARIPLLTFLVIFITAVILIVLFFIVYRTKIGMAMRAISMDIPTTALMGVNVDAVIGFTFALGSALAAASGIMWAMRFPNVHPYMGFMPGLKAFIAAVFGGIGSIPGAVLGGVLLGLIEIFLAAYFPAVMGYRDAFAFIILIIILLVKPSGLLGKKIVEKV

SEQ ID NO: 504 - DNA, 1614 bp, Sinorhizobium meliloti
  CDS (1)..(1614)
atgtaccgcatcatcccaaccgtgctggctgccctgttccttttcgttgcgatggctccggggcttcgcgcggaagagggactgcgcgatctggtgaacgcgctcggcgaggcgaagctgtccgagatggacgagcatatcgcggcactggcgaagaccggaaagcccgaagtcgtcgccatcctcgaggcgctcggggaaggcgagctctatgcgcgcaaggcggacggccaggtcttgttgacgaaggagagcggttcgaacctgacccttacggatccgatctccggcgacagcgccggcgaagcgccgaaggcggcactttcgaagatcagggtgaacaacagcgtgcggcgcgccgtgcgcaccgccctcggcagcctgacgctcctcagccccgatcgcaatcagcgcctcagggccgcgcagtcggtgctgcaatcgcccgatgccgacgcgctcggcgtcatcgagaatgcactggctgccgagaaggatggagccgttcgtgcggttctcgaacaggcgcgcgccacgatgctgcttctctccgaccggccggtcgaggagaagaaggaggcggtgcggctgctggaggaaaacggcggccgcgaggcgctgccgatcctttctgccgcgctcggctctgccgacgaaagcctgaagccggacatcgaggcggcgctcgccagcatcgaacaggcgcaagccttctggaatgcgggccagaacatatggtacggcctgtcgctcggctcggtgctgctcttggcggcgatcggtctcgccatcaccttcggcgtcatgggcatcatcaacatggcgcatggcgagatggtgatgctcggggcctatacgaccttcctcgttcaagatgtcgtgcgcacctcctttcctcatcttttcgagtggtccttggcgatcgcgctgccgctcgcctttcttgttacaggcgccgtgggcctcgcactggaacgcggcgtcatccgctttctctacgggcgcccgctcgaaacgctgcttgccacctggggcatatcgctcatcctccagcagacggtgcggacgatcttcggccccaccaaccgtgaggtcggcaatccgtcctggatgtccggcgccttcgagctcggcggactggcgatcacctggaaccgtctctggatcatcgtctttgcgcttgcggtgtttgcggcacttctctttctgctcaagaagacgccgatgggcctgcagatgcgcgcggtaacgcagaaccggcgcatggcctcttccatgggcatccgcacgccctgggtcgatgcgctgaccttcgcgctcggctccggcatcgccggcattgcgggtgtggcgctttcgcagatcgacaacgtctcgccgaacctcgggcagggctacataatcgacagcttcatggtcgtggtcttcggcggcgtcggcaatctctggggcacgcttgtcggcgccttctcgctcggcatcctcaacaagttcctggagccctatgccggcgccgtgctcggcaagatcctcgtgctcgtgctgatcatcctcttcatccagaagcggccgcgcgggctcttcgcactcaagggccgggcggtggaagcatga

SEQ ID NO: 505 - protein, 537 aa, Sinorhizobium meliloti
MYRIIPTVLAALFLFVAMAPGLRAEEGLRDLVNALGEAKLSEMDEHIAALAKTGKPEVVAILEALGEGELYARKADGQVLLTKESGSNLTLTDPISGDSAGEAPKAALSKIRVNNSVRRAVRTALGSLTLLSPDRNQRLRAAQSVLQSPDADALGVIENALAAEKDGAVRAVLEQARATMLLLSDRPVEEKKEAVRLLEENGGREALPILSAALGSADESLKPDIEAALASIEQAQAFWNAGQNIWYGLSLGSVLLLAAIGLAITFGVMGIINMAHGEMVMLGAYTTFLVQDVVRTSFPHLFEWSLAIALPLAFLVTGAVGLALERGVIRFLYGRPLETLLATWGISLILQQTVRTIFGPTNREVGNPSWMSGAFELGGLAITWNRLWIIVFALAVFAALLFLLKKTPMGLQMRAVTQNRRMASSMGIRTPWVDALTFALGSGIAGIAGVALSQIDNVSPNLGQGYIIDSFMVVVFGGVGNLWGTLVGAFSLGILNKFLEPYAGAVLGKILVLVLIILFIQKRPRGLFALKGRAVEA

SEQ ID NO: 506 - DNA, 1080 bp, Thermotoga maritima
  CDS (1)..(1080)
atgatgaagatggagaagaaactatctgcacgaacgaacttcattctcacggttgttttcctgatcttcatggcccttcttctctatctggctgatagatacatggacagctacaagctgagagtagtgaggctcatcgccatatacggtatcatggcggtgagtttgaacctgataaacggtatcacgggtatcttttctcttggacacgccggtttcatcttgataggtgcttatacggcgtctcttctcacactttcaccagagcagaaagcgatgtcttttataatagagccgatcgttccctggcttgcgaacgcgcacaccgacttcttcaccgccacagtggcaggcggtgttctggcagccgtcttcgcttttctcatagggtggccggttttgaggctttccggtgattacctcgcgatagcgtcccttgggttcgcagaggtgataaggatcatcgctctcaacgccatcagcatcacaaacggccctctcggtctcaagggaattccggaatactcaaacatctggtggtgttacggctggctattcgtaacggttctgttcatggcaagccttgtgaacagtagctacggaagagctttgaaggccatcagagaagaccgcatagcagccgaagccatgggaataaatgttttcaaacatcagcttctttctttcgtcataggagccttctttgcgggtgtttctggttcgctctacgcgcactggctcaccacgatagatcccagaacgaccacactcggtcccatgctcactttctacgttctcatcatgatagttctgggtggactcggcagtatttccggttcgctcataggagccgctctcttcgctatactcttcgagtggctcagggatctggaagagcctttcacgttcttcggcatacacgttcccggtataaagggaatgaggatcctcgtgatatccgccattttcatccttgtgatgatcttctggcagaggggtatcatgggaagagaagaactcacctggaacaacctttacagatggctctttgctcgtcgcaggggtggtgaagagaaatga

SEQ ID NO: 507 - protein, 359 aa, Thermotoga maritima
MMKMEKKLSARTNFILTVVFLIFMALLLYLADRYMDSYKLRVVRLIAIYGIMAVSLNLINGITGIFSLGHAGFILIGAYTASLLTLSPEQKAMSFIIEPIVPWLANAHTDFFTATVAGGVLAAVFAFLIGWPVLRLSGDYLAIASLGFAEVIRIIALNAISITNGPLGLKGIPEYSNIWWCYGWLFVTVLFMASLVNSSYGRALKAIREDRIAAEAMGINVFKHQLLSFVIGAFFAGVSGSLYAHWLTTIDPRTTTLGPMLTFYVLIMIVLGGLGSISGSLIGAALFAILFEWLRDLEEPFTFFGIHVPGIKGMRILVISAIFILVMIFWQRGIMGREELTWNNLYRWLFARRRGGEEK

SEQ ID NO: 508 - DNA, 858 bp, Deinococcus radiodurans
  CDS (1)..(858)
atgaccacagttttgcaacaacttttcaacgcgctcgcgctcggcggggtgtacgccctggtcgcgctggggctgacgctggtctacggcgtgatgaaaattcccaacttcgcccacggcggactgtacatgctcggcgcttacctttcttacgcgggcatcagctcgctggggctggggtacgtgcccgcgctgctgctctctgccgtcgtcgtggcgctgctcgctgccctgatggaacgggtcattttcttcccgctgcgcaacgcgccgcacgtgcagcccatgattgccgcgctgggcgtgctgttttttctggaagccggggtgcagctcatctggggcgccgacttcaagcaggtggccgagccaatcccaggcatcctcaatatcggcggcgtcacgatcacctggcagcgcctgatcgtgctcgtcgccagcgtggtcgccatgctggggctgaacttcttcctgcgccgcaccctgaccggcgccaccatcgaggcgatggcgcaaaaccgtgagggcgcacggctcgtcggcatcaacaccgggcgggtcgggatgctcaccttcgccatctcgggggcactcgcggccatcggggcatctctcatcgcgcccatcgtgtcggtcaccccggcgatgggtgaaatcatgaacctcaaggtcttcgccatcatcatcctgggcggcatgggcagcattcccggcgccatcgtgggggcttttttgctcgccttcgctgaagtgttcggcggctacatcaacctcgactttgctgaggtcatcggcttcgcggtgctggtggtcgtgctcgccattcgtccgcagggcctgttccggagggccgcatga

SEQ ID NO: 509 - protein, 285 aa, Deinococcus radiodurans
MTTVLQQLFNALALGGVYALVALGLTLVYGVMKIPNFAHGGLYMLGAYLSYAGISSLGLGYVPALLLSAVVVALLAALMERVIFFPLRNAPHVQPMIAALGVLFFLEAGVQLIWGADFKQVAEPIPGILNIGGVTITWQRLIVLVASVVAMLGLNFFLRRTLTGATIEAMAQNREGARLVGINTGRVGMLTFAISGALAAIGASLIAPIVSVTPAMGEIMNLKVFAIIILGGMGSIPGAIVGAFLLAFAEVFGGYINLDFAEVIGFAVLVVVLAIRPQGLFRRAA

SEQ ID NO: 510 - DNA, 1053 bp, Campylobacter jejuni
  CDS (1)..(1053)
atgatggttagaattaaggtttcacatttaatctttttaattgcttcaattatttttattttcatttctccttatatttttggggattatggattaaacattgttaatcaaattgctatttttattattttggctgtgagttacaatcttattaatggtgtaactggacaattttcactagaacccaatggatttgttgcgattggagcttatgcggctgctttagttcttttaagtgctgatgcaaaaaatgatcagttttttttagatggtcctagttcttttattttagctatccattcaaattcctttattctagctttaattgtggctggaatttgttcatctttacttgccctgattttggcttttgctgtatttcgcgtgagaggggattatttggctattgtaactttaggctttggaataattattaaaatagctgctattaattttccttctattactaatggctcaagagggctggtagatattccacaattttccacgatctattggacaggtggtattgctattgtagcggttattttaattttaaatatagtttattctaaatatggtcgtgcaatgaaggctataagagatgatgaagatgctgcaagcgctatgggaataaatactttttggataaaaactttagcttttagcacttcagcatttttagaaggtgtaggtggcggacttttagcttgtctgttgactaccgtatctccaactcaatttgattttttacttacttttcagcttttgattattattgttttaggtggacttggttctactacaggtgctattataggtgcgatattggttattggtggaagtgagtggcttagatttttagatgagttaaatataaaaatagattctttaaatcttgatatccaatcaacgccagggcttagaatggttgttttttctattgttctgattttagtaatgctttttgcaagaaaaggcataatgggttattatgagttgagtgatgtgattagagggattaaaaagcgttttaaaaggagcaaaaaatga

SEQ ID NO: 511 - protein, 350 aa, Campylobacter jejuni
MMVRIKVSHLIFLIASIIFIFISPYIFGDYGLNIVNQIAIFIILAVSYNLINGVTGQFSLEPNGFVAIGAYAAALVLLSADAKNDQFFLDGPSSFILAIHSNSFILALIVAGICSSLLALILAFAVFRVRGDYLAIVTLGFGIIIKIAAINFPSITNGSRGLVDIPQFSTIYWTGGIAIVAVILILNIVYSKYGRAMKAIRDDEDAASAMGINTFWIKTLAFSTSAFLEGVGGGLLACLLTTVSPTQFDFLLTFQLLIIIVLGGLGSTTGAIIGAILVIGGSEWLRFLDELNIKIDSLNLDIQSTPGLRMVVFSIVLILVMLFARKGIMGYYELSDVIRGIKKRFKRSKK

SEQ ID NO: 512 - DNA, 918 bp, Sulfolobus solfataricus
  CDS (1)..(918)
atgatagatcctctgattataaatacaatagtttacggttcgattcttggtttatcaagtctctccctaactttaacttacttaacaactaaagtacctaatttcgctcacggtatctttctgttgtttggttcctatatgacctttaccatagccgaagtcttaaaacagaatccgtacatttcgctacctatcgcattcttattaggtggggcaattgcattactccaatactatggtgtgttactgccgttaagtatgagaggtggcggtttagtatcacaaatggttgctactctagccttttccattttactgtatggaggattaaacgcatatgcaagttatcttggctatgtgtataatgtgcaatctagagatgtaacgctaggattcttagattacgaaataggagggattagagctgttttcctaatttccatcatcttagcaatagcattcatactctcactttatatcttcttgaataagactagattaggaatatccattagggctacagttgagaactcgtcactagctgaaagcatgggtataaacacgaaactagttaaggcgatttcttggtttttagctggaggtatagcaagtactgccggctccttatatcctctacaatttgtattttcacctacattagcgtactcgatattactaagtatattcgcagcaagtgtactaggaggtctaatgagcctattcggtggattcattggtggattcattgagggattcatagaaaaatacatcatgactgaattatcaatctatctgtctccactaataggagtgagtcctttcgttattaaccagtattcaacactggttcctcttatagtagtagcagcagttctcctgatagctccaaacggaattatgggagtgagggtgaaataa

SEQ ID NO: 513 - protein, 305 aa, Sulfolobus solfataricus
MIDPLIINTIVYGSILGLSSLSLTLTYLTTKVPNFAHGIFLLFGSYMTFTIAEVLKQNPYISLPIAFLLGGAIALLQYYGVLLPLSMRGGGLVSQMVATLAFSILLYGGLNAYASYLGYVYNVQSRDVTLGFLDYEIGGIRAVFLISIILAIAFILSLYIFLNKTRLGISIRATVENSSLAESMGINTKLVKAISWFLAGGIASTAGSLYPLQFVFSPTLAYSILLSIFAASVLGGLMSLFGGFIGGFIEGFIEKYIMTELSIYLSPLIGVSPFVINQYSTLVPLIVVAAVLLIAPNGIMGVRVK

SEQ ID NO: 514 - DNA, 1050 bp, Deinococcus radiodurans
  CDS (1)..(1050)
atggatatttttgaccccaccatttttcccatcctgaccaccgacgggctgacgaacggcgcggtgtacgcgctgctttcgctggcgctggtgctggtgtttgccgtgacccgcgtgatttttattccgcagggcgaattcgtgatgttcggggcgctgacgctggcgagcctgcaagcaggaaaggtgcccggcacgctgaaactggtactggcgctgctcgccctgagcgtgattctgaacgtggtacagtcgctgcgcgccgggcacactcaagcggcgctgcgaagtgtcctgattggcctgggcgcctgggcgctgctgtgggcgctgaccggctggctcgcgccgctcaaggcgccactggcggtgcaggtgctgctgacgctgctgctcgtcgtgccgctggggccgctgctttaccgcgtggtgtaccagccgcttcgcaacgccaccgtgctggtgctgctcatcgcctcggtcgcgctgcacctcgcgctcaccgggctggggcttgcgttcttcggcgccgagggcagcaacacgcccgccttcgtcagcggtgatctccacatcggcagcttttcgctgagttaccagaacctgctcgtcatggtcgtttcgctggcgctgatggcgggcctcgccgtctttttcgagcgcacgctgctcggcaaggcgctgcgggccaccgccgtgaaccggctgggcgcgcggctggtgggcattcggcccgagttcgccgggtcactcgcctttacggtggcggccttgatgggcgtgctgagcggcctgctcatcggccccaagttccccatcgggtacgacaccggcttcctcatcggtctcaagggctttgtcggcgcgattatcggcgggctggcgtcttttccgctggccgccatcggggcgctgctggtgggcctcatcgagagttacgccagtttcagcctcagccagtggaaagaagtcatcgtgttcaccctgattttgccggtgctgctgtggcgttccctctccacccggcaccatgacgaggaggaagagtga

SEQ ID NO: 515 - protein, 349 aa, Deinococcus radiodurans
MDIFDPTIFPILTTDGLTNGAVYALLSLALVLVFAVTRVIFIPQGEFVMFGALTLASLQAGKVPGTLKLVLALLALSVILNVVQSLRAGHTQAALRSVLIGLGAWALLWALTGWLAPLKAPLAVQVLLTLLLVVPLGPLLYRVVYQPLRNATVLVLLIASVALHLALTGLGLAFFGAEGSNTPAFVSGDLHIGSFSLSYQNLLVMVVSLALMAGLAVFFERTLLGKALRATAVNRLGARLVGIRPEFAGSLAFTVAALMGVLSGLLIGPKFPIGYDTGFLIGLKGFVGAIIGGLASFPLAAIGALLVGLIESYASFSLSQWKEVIVFTLILPVLLWRSLSTRHHDEEEE

SEQ ID NO: 516 - DNA, 903 bp, Deinococcus radiodurans
  CDS (1)..(903)
atggacctgaccttccttgccaaccaactgttcaccgggctctcggtggcgtccatcctgctgctggcggcgctggggctggcgctgaccttcgggctgatgcgggtcatcaacatggcgcacggcgaatttctgatggtgggcggttacctgacctacctcgcggcccgctggaccggccccgccctgggcgacggctacctgtgggtcgcttttccgctcgccttcgtgggcacggcgctgctgggcgccctgctggaagtgctggtcatccggcggctctacgggcgcccgctcgacacgctgctggcaaccttcggcatcagcttgatcctgcaacaggccgcgcggcaggtgttcggcagcacgggcgtgccggtcacggctcccgcctggctgtcgggcagcgtgacgctgggcgccgtgaccatgccgggcagccgcctgttcgtcatcgcgctttccctgctggtgatcggcgcggtgtggtggctgctctcgcgcacccgcttcggcatggtggtgcgggcggtcaaccagaaccgtgagatggcggcggcgctgggcgtcaacacccgggcactcgacctgctcgtcttttccctcggcgcgggcattgcgggggtggcgggcgtgggcctcgcgctgcttgccccagttaaccctaccgtcggcgcggcgtacatggtcaatgcctttctcgtcgtggtggtcggcggcgtgggcagcgtgctcggcgcgggcgtcgcggccatattgctcggcagcctcacggcgttggccgagggcctgaccagcgagagcctcgcgcaggccgcgctgctggtgctggtggtggcgttcttgcagtggaaaccgcgcggcctgtttcccaccgagtcccgcgctctggaggacgcatga

SEQ ID NO: 517 - protein, 300 aa, Deinococcus radiodurans
MDLTFLANQLFTGLSVASILLLAALGLALTFGLMRVINMAHGEFLMVGGYLTYLAARWTGPALGDGYLWVAFPLAFVGTALLGALLEVLVIRRLYGRPLDTLLATFGISLILQQAARQVFGSTGVPVTAPAWLSGSVTLGAVTMPGSRLFVIALSLLVIGAVWWLLSRTRFGMVVRAVNQNREMAAALGVNTRALDLLVFSLGAGIAGVAGVGLALLAPVNPTVGAAYMVNAFLVVVVGGVGSVLGAGVAAILLGSLTALAEGLTSESLAQAALLVLVVAFLQWKPRGLFPTESRALEDA

SEQ ID NO: 518 - DNA, 897 bp, Campylobacter jejuni
  CDS (1)..(897)
atggattctactttatttttacaacaacttgttaatggacttagtttgggcagtatgtatgctcttattgctgttggctatacgatggtttatggtgtgttaagacttattaattttgctcacggcgatattatgatggttggtgcttatgcggctcttttttgcatgactaatctaaatgttccttttctaggagctttgtctttagcaatgatttttgctgcttgtgttggaatagctacagatagaatcgcttataaacctttaagacaggctcctagaatttcattgttgattacagcaatcggtattagttttttcttgcaaaatctttttaatatgctttttacttcaacacctagaacttttacaccgccaagttattttgaggaaagtgttaattttggtggagtgataacaacttatggttctttaatggttcctgctcttacatttgttattttaatagcagtgttatggattttgtataaaagcaaatatggtatagctattcgtgctttggcatttgatatacaaacagtaaatttaatgggtatagatgcaaatcgtattattgctatagtttttgccctaggttcagctttggcagcagttgggggtgttttttgggctgcaaattattactctgttgaacctactatgggaactttaataggtttaaaagcttttgctgctgcagttttaggaggtataggttctgtagtaggtgcagttttgggtggacttattataggatttactgaagttgttgttgtggctttttttccagatttatcaggctttaaagatgcatttgcttttatttttttggtgtttatattgttatttaggcctacgggaattttaggtataaattttgaaaagagtaggttttaa

SEQ ID NO: 519 - protein, 298 aa, Campylobacter jejuni
MDSTLFLQQLVNGLSLGSMYALIAVGYTMVYGVLRLINFAHGDIMMVGAYAALFCMTNLNVPFLGALSLAMIFAACVGIATDRIAYKPLRQAPRISLLITAIGISFFLQNLFNMLFTSTPRTFTPPSYFEESVNFGGVITTYGSLMVPALTFVILIAVLWILYKSKYGIAIRALAFDIQTVNLMGIDANRIIAIVFALGSALAAVGGVFWAANYYSVEPTMGTLIGLKAFAAAVLGGIGSVVGAVLGGLIIGFTEVVVVAFFPDLSGFKDAFAFIFLVFILLFRPTGILGINFEKSRF

SEQ ID NO: 520 - DNA, 939 bp, Archaeoglobus fulgidus
  CDS (1)..(939)
atggatactatttcatctttcgagatcgtcaaaaatattatcgaagggtctctcatatactccaaccttctcgtattgctgagcatagggctcaccattacctacataactacggcagttcccaacttcgcgcaggggagcttcgcaatatttggctcatacgtggccctgaccatgctgaggctttttggcatccacccctacgcttctttgcccgttgcttttgcacttggcggtttgcttggcattgcaacctacatcctcatcctgcgcccgctcatcaggcgcggcgcctccgtagtgattttgatgattgcaacgctggcctttgacttgattctccttggcattattggctcatactctgaaactctcgcaaccataaccagaaaatccgcctcgaagttcacctttatcccgacagacttcaagatgttttccttctccgcctcactcttcgtttcttccctggttataattattgttctcgcatcactcgtaacgctgctttacaaaacaaagttcggagttgccctgagggcctcgatggagaaccccgctctggctgaggtgatgggtgtcaatgtggagtacacgaggctcttctcgtggtttctttcaggcgctttggctgcgatggcggggtgtctgctgccattcaagtacgaaatagttccgagcacgggtgcaatcatcattgtctccatatttgcttcgagcattgtcggggggctttcaacaatctacggagcattgctcggaggctacataataggattttcggagacaagtgttacttacgcactttcctctgtgttcggaacaggagttttgctctacggcagagttgtttcgttgctggtgctagtcgcaacacttatcctcgcccccaagggccttacaggtgtgaagtggaggaggttgctatggagcagataa

SEQ ID NO: 521 - protein, 312 aa, Archaeoglobus fulgidus
MDTISSFEIVKNIIEGSLIYSNLLVLLSIGLTITYITTAVPNFAQGSFAIFGSYVALTMLRLFGIHPYASLPVAFALGGLLGIATYILILRPLIRRGASVVILMIATLAFDLILLGIIGSYSETLATITRKSASKFTFIPTDFKMFSFSASLFVSSLVIIIVLASLVTLLYKTKFGVALRASMENPALAEVMGVNVEYTRLFSWFLSGALAAMAGCLLPFKYEIVPSTGAIIIVSIFASSIVGGLSTIYGALLGGYIIGFSETSVTYALSSVFGTGVLLYGRVVSLLVLVATLILAPKGLTGVKWRRLLWSR

SEQ ID NO: 522 - DNA, 1071 bp, Deinococcus radiodurans
  CDS (1)..(1071)
atgccaagctcccccgctgacttttttgggccggggagcgcaccgggggcggcttatgccgcaggcgaacgaaaggaaactatggacataaacacggtgctcacgattctggctcaggtcttcgtcggcggcctgagcctcggcgtgctgtacgccatcatcgcgctgggctacacgatggtgtacggcgtgctgcaactgatcaacttcgcgcactcggaggtctttatcaccgggggcgtggtcgcctacttcgtctttgaggcgctcaaggagtcgcccatgaacgggctgctcaagctgctgatcgcggcgctcgcggcgatggccgtgtcgggcgggctcaacgtgctgatcgagcgcctcgcctaccggcccattcggggagcgcagcgcttggtgcccttgattaccgccatcggcgtgtcgctgattttgcaagacctgctgcgcctcatcgtcggcctacgcgggctgttcgacctcagcgtgacgctgccgcagggctttgccgaccccatcaccaaagtcggcggggtgaacatctcggtgctgaacttgcaggtcaaggacatcatcctgatcgtggtggccgggctgatgctcatagggctcaacctgctcgtcaaccacacccggctgggccgcgccattcgcgccgtggcgcacgaccggcagacgtcgggcctgatgggcatcgactcgaaccgcatcatcagcttgaccttcttgatcgggggcgcgctgggcggcctcggcggggcgatgttcgccatgaaatatcaagcactcaacgcctactcgggcatggtgccgggcatcaaggcctttacggcggcggtgctcggcggcatcggcaacattcccggcgcggtgctcggcgggctggtgctcggctggctcgaaacgctgctcggcaccattgacctctttcaggtggtgccggggctgggctggctgaaatacatcacttccgactacaaagacctcggcgccttcttagcgctgctgctgattctctttttcaagcctgccggtctgctcggcaaggccaccacggagaaggtgtaa

SEQ ID NO: 523 - protein, 356 aa, Deinococcus radiodurans
MPSSPADFFGPGSAPGAAYAAGERKETMDINTVLTILAQVFVGGLSLGVLYAIIALGYTMVYGVLQLINFAHSEVFITGGVVAYFVFEALKESPMNGLLKLLIAALAAMAVSGGLNVLIERLAYRPIRGAQRLVPLITAIGVSLILQDLLRLIVGLRGLFDLSVTLPQGFADPITKVGGVNISVLNLQVKDIILIVVAGLMLIGLNLLVNHTRLGRAIRAVAHDRQTSGLMGIDSNRIISLTFLIGGALGGLGGAMFAMKYQALNAYSGMVPGIKAFTAAVLGGIGNIPGAVLGGLVLGWLETLLGTIDLFQVVPGLGWLKYITSDYKDLGAFLALLLILFFKPAGLLGKATTEKV

SEQ ID NO: 524 - DNA, 864 bp, Sinorhizobium meliloti
  CDS (1)..(864)
atgcaaaccatcttcagcatagccgtcgatgcgctcgcctatggcacggtgctgttcgtgatctcgatcggcctttcggtcacgctcggcctcatgcgcgtcgtcaatcttgcccacggggcctttgcgatgatcggcggctatatcgcatcctatgcggcgcgtgatctcgggctcggctacggcgccgcggtgctgatcgcggtcttcggcacgatcgtcatcgccatcccgatcgagcgcctgctctaccgccgcatctacggtcagccggagctgactcaggtgctgatgacgatcggcatcaccttctgcatcatcggcattgccaactacgtcttcgggccgactctcaagacgatcccgctgccgccgagccttgagggctccgccgatctcggcttccgttcgatcgccgtgcaccggatattcgcgatcgtctgcggcctcgccgttgccggagccctctggtttgccatcgagaagacggccttcggggtgaaactcagggccgccgtcgacaatgcggcgatggcggcggcactcggagtgcgcacggaggtcgtctatgccgtgagtttcgccgtcgccgtgggccttgccgcgttcggcggcgtcgtcggcgcggaactgctgccggtcgagccctattatgcgctcagatacatggtcaccttcctggtggtcgtttccgtcggcggtgcggggtcgatcccgggtgcgcttgccgcctgcctgctgcttggcggcatcgatacgacggggcgctatctcatgccggaattcggggaattcttcttctatctcgccgtcatcgccatcgtctgcgtatttccgcgcggccttgccgggaggattaagtag

SEQ ID NO: 525 - protein, 287 aa, Sinorhizobium meliloti
MQTIFSIAVDALAYGTVLFVISIGLSVTLGLMRVVNLAHGAFAMIGGYIASYAARDLGLGYGAAVLIAVFGTIVIAIPIERLLYRRIYGQPELTQVLMTIGITFCIIGIANYVFGPTLKTIPLPPSLEGSADLGFRSIAVHRIFAIVCGLAVAGALWFAIEKTAFGVKLRAAVDNAAMAAALGVRTEVVYAVSFAVAVGLAAFGGVVGAELLPVEPYYALRYMVTFLVVVSVGGAGSIPGALAACLLLGGIDTTGRYLMPEFGEFFFYLAVIAIVCVFPRGLAGRIK

SEQ ID NO: 526 - DNA, 855 bp, Archaeoglobus fulgidus
  CDS (1)..(855)
atgatcgagacgctggtcaagatagccgtatttggtgctgtggtggggggaatctgggggctcgtcgcctcaggattctccctaatttttggtgtgtcgaggattctgaacttcgcccacggtgcagcattcgtcagctccgcctttctggcatacgctctcataagcgaggggtacaacctttaccttgccatcctcgcaggcttgctgctttcagcgctaatcggtttggcggtttacgcattaacaaagcctgtgagggatagggaggtcatggttatcatcctgacgctcgcattcgcccttctggtgcagcaagtactcttggttttgtacggggacagaggcgtatccatcgagccatttgtaagcgggtttgcagagatagggggtgttaaggttacctatatgagaattctttcatttgtcctagcggtcctctgcctcactgcgcttgaggtttttgtgacgagaaccaagctcggaaagaaggttatagctacagctcaggacagcagagcggccatgatggtagggattgacatcgaaaagatatttctccttgtgatggttctttcatccgtccttgcaggattcgctgggattctctacgcccagatatttgcagtcagtcccgaagtctccctgagggctttaatttacgccttcgccatcgtaattctcggtgggcttggcagccttaggggcagtgttgttgcatcgttcatagtgggatacattctcgtgacgacgataaccttcctcggagcgagatggtccgagttcgtgatgcttctaacgatcgtggcgattctaattgtcaagccaacgggtctgttcggggtggaagaatga

SEQ ID NO: 527 - protein, 284 aa, Archaeoglobus fulgidus
MIETLVKIAVFGAVVGGIWGLVASGFSLIFGVSRILNFAHGAAFVSSAFLAYALISEGYNLYLAILAGLLLSALIGLAVYALTKPVRDREVMVIILTLAFALLVQQVLLVLYGDRGVSIEPFVSGFAEIGGVKVTYMRILSFVLAVLCLTALEVFVTRTKLGKKVIATAQDSRAAMMVGIDIEKIFLLVMVLSSVLAGFAGILYAQIFAVSPEVSLRALIYAFAIVILGGLGSLRGSVVASFIVGYILVTTITFLGARWSEFVMLLTIVAILIVKPTGLFGVEE

SEQ ID NO: 528 - DNA, 972 bp, Archaeoglobus fulgidus
  CDS (1)..(972)
atgaactggaagtttgtttatcccgtaattttgattctggcagtgcttctgccgctgacaggttcgtcttatgcgctcaggatttcaacgctgttcataatatacacaatagctgccatggggctgaacataataatcggatacacaggccaagcttctctggctcagggagctttttacggtcttggagcctacgttagcgccttgcttgtgcttaacggctggtctttctgggcgtcagtgatcgtggcaatcgccttcgtggcctttgtggcgttcctgataggtctaatgactctcagacttaagggtgcgtactttgccattgccacgctcttattcaacgtcataatctatgaagttgtggacaagtgggatgaggttaccagagggccgagggggctttttggcatcccttctccgtcaattgagcttagcggtatttcaatcagtttcagtggaacctacaacttttactacctcatgctggccgttctgatcgtcatgactctcctttactggcttataatcaggtcctccttcggcagcataatagttgcaatcagagagaatgagctattggccgagtacgcaggggtaaatcttacgaagttcaaggttgcctctttcgtcttaagtgccatcttcgccgctgttgctggagccttctactctgcatacatcggcagcatctttccagatattacgagcttcgttaacagctttgcattcctcaccgctatcatctttggaggcgctggaactatgcttggaccgttcataggaaccgccgttgttacgctgataaacgaggtcttcttcacactcgctcagtacacagtcctcgttcagggaatcgtattccttttggcgattctgttcatgccaaaaggagttatgggggcttactactctagaaaggccgagaagggagaaaaacttcccaaaagggctcttgtaggtaagttctga

SEQ ID NO: 529 - protein, 323 aa, Archaeoglobus fulgidus
MNWKFVYPVILILAVLLPLTGSSYALRISTLFIIYTIAAMGLNIIIGYTGQASLAQGAFYGLGAYVSALLVLNGWSFWASVIVAIAFVAFVAFLIGLMTLRLKGAYFAIATLLFNVIIYEVVDKWDEVTRGPRGLFGIPSPSIELSGISISFSGTYNFYYLMLAVLIVMTLLYWLIIRSSFGSIIVAIRENELLAEYAGVNLTKFKVASFVLSAIFAAVAGAFYSAYIGSIFPDITSFVNSFAFLTAIIFGGAGTMLGPFIGTAVVTLINEVFFTLAQYTVLVQGIVFLLAILFMPKGVMGAYYSRKAEKGEKLPKRALVGKF

SEQ ID NO: 530 - DNA, 870 bp, Streptococcus pneumoniae
  CDS (1)..(870)
atgctccaacaactcgtaaatggtttgattctaggtagtgtttacgcgctgttagccctaggatataccatggtttacggaattatcaagctcatcaacttcgcccatggtgatatttatatgatgggagcctttatcggttatttcttgatcaattctttccaaatgaatttctttgtagcgcttattgtagctatgctagcgacagctattcttggtgtcgtgattgagtttcttgcttaccgacctttgcgccactctactcgtattgctgttttgattacggctattggggtttctttcctattggagtatggaatggtctatctggttggtgccaatacccgtgccttccctcaagcgattcaaacagttcgatatgatttgggaccaattagcttaacaaatgtgcagttaatgattttggccatttccttgattttgatgattttgttacaagtcattgtccaaaagactaagatggggaaagccatgcgtgcagtatcagtagatagcgacgcggcgcaattgatggggatcaatgtaaaccgtacgattagctttaccttcgctttgggttctgctcttgcgggtgcggctggtgttctgattgctctttattataactctcttgagcctttgatgggggttactccaggtcttaaatctttcgttgccgcagtacttggtggtatcggaattattcctggtgcggctcttggtggctttgtgattggtctattggaaacctttgcgactgcctttgggatgtcagatttccgtgatgccattgtttatggaatcttgttgttgatcttgattgtccgcccagctggtatccttggtaagaatgtgaaagagaaggtgtag

SEQ ID NO: 531 - protein, 289 aa, Streptococcus pneumoniae
MLQQLVNGLILGSVYALLALGYTMVYGIIKLINFAHGDIYMMGAFIGYFLINSFQMNFFVALIVAMLATAILGVVIEFLAYRPLRHSTRIAVLITAIGVSFLLEYGMVYLVGANTRAFPQAIQTVRYDLGPISLTNVQLMILAISLILMILLQVIVQKTKMGKAMRAVSVDSDAAQLMGINVNRTISFTFALGSALAGAAGVLIALYYNSLEPLMGVTPGLKSFVAAVLGGIGIIPGAALGGFVIGLLETFATAFGMSDFRDAIVYGILLLILIVRPAGILGKNVKEKV

SEQ ID NO: 532 - DNA, 888 bp, Agrobacterium tumefaciens
  CDS (1)..(888)
atgacgatgatcttcggcattccaattcaggccctgctcgggcaattgctgatcggcctgatcaacggctcgttttatgcgctgctgtcgctcggccttgccgtcattttcggcctgctgcgcgtcatcaattttgcccatggggcgcaatatatgctcggggcttttgtcgccttcctcggcctgcaatatttcggcatcaatttctggatggcgctcatcgttacgccgctcgtcgtcgcgcttttcggtgcgatcgtcgaacgtttcatgctgtcgcggctttatgatctcgatccgctttacgggctgcttttcaccttcggtctggcgctggtggtggaaggcacgttccgctggctttatggtgcggcgggccagccctattcggtgccgcgtgagcttgccggcggcaccaatctcggcttcatgttcctgccgaattatcgcgccttcgttgtcgtcatttcgctggtcgcctgcatcgccacctgggcgttgatcgaaaagacgcggctcggctcctatctgcgggcggcgacggaaaatccgacgctggtgcaggctttcggcatcaacgtgccggtgctgctgacgctgacttatgcgctgggtgccggccttgccgggttcaccggcgtgctggccgcacccatctatcaggtctcgccgctgatgggcaccaacctcatcatcgtcgttttcgccgtggtcgtcgtcggcggcatggggtcgatcatgggtgccatcgtcaccggttacatgctgggtatcgccgaaggcctgaccaaggtgttttaccctgaggcctccaatatcgtcatcttcgtcatcatggcctttgtgctgctcatccgccccgccggacttttcggaaaggacgcctga

SEQ ID NO: 533 - protein, 295 aa, Agrobacterium tumefaciens
MTMIFGIPIQALLGQLLIGLINGSFYALLSLGLAVIFGLLRVINFAHGAQYMLGAFVAFLGLQYFGINFWMALIVTPLVVALFGAIVERFMLSRLYDLDPLYGLLFTFGLALVVEGTFRWLYGAAGQPYSVPRELAGGTNLGFMFLPNYRAFVVVISLVACIATWALIEKTRLGSYLRAATENPTLVQAFGINVPVLLTLTYALGAGLAGFTGVLAAPIYQVSPLMGTNLIIVVFAVVVVGGMGSIMGAIVTGYMLGIAEGLTKVFYPEASNIVIFVIMAFVLLIRPAGLFGKDA

SEQ ID NO: 534 - DNA, 1278 bp, Escherichia coli
  CDS (1)..(1278)
atgaaaccgatgcatattgcaatggcgctgctctctgccgcgatgttctttgtgctggcgggcgtctttatgggcgtgcaactggagctggatggcaccaaactggtggtcgacacggcttcggatgtccgttggcagtgggtgtttatcggcacggcggtggtctttttcttccagcttttgcgaccggctttccagaaagggttgaaaagcgtttccggaccgaagtttattctgcccgccattgatggctccacggtgaagcagaaactgttcctcgtggcgctgttggtgcttgcggtggcgtggccgtttatggtttcacgcgggacggtggatattgccaccctgaccatgatctacattatcctcggtctcgggctgaacgtggttgttggtctttctggtctgctggtgctggggtacggcggtttttacgccatcggcgcttacacttttgcgctgctcaatcactattacggcttgggcttctggacctgcctgccgattgctggattaatggcagcggcggcgggcttcctgctcggttttccggtgctgcgtttgcgcggtgactatctggcgatcgttaccctcggtttcggcgaaattgtgcgcatattgctgctcaataacaccgaaattaccggcggcccgaacggaatcagtcagatcccgaaaccgacactcttcggactcgagttcagccgtaccgctcgtgaaggcggctgggacacgttcagtaatttctttggcctgaaatacgatccctccgatcgtgtcatcttcctctacctggtggcgttgctgctggtggtgctaagcctgtttgtcattaaccgcctgctgcggatgccgctggggcgtgcgtgggaagcgttgcgtgaagatgaaatcgcctgccgttcgctgggcttaagcccgcgtcgtatcaagctgactgcctttaccataagtgccgcgtttgccggttttgccggaacgctgtttgcggcgcgtcagggctttgtcagcccggaatccttcacctttgccgaatcggcgtttgtgctggcgatagtggtgctcggcggtatgggctcgcaatttgcggtgattctggcggcaattttgctggtggtgtcgcgcgagttgatgcgtgatttcaacgaatacagcatgttaatgctcggtggtttgatggtgctgatgatgatctggcgtccgcagggcttgctgcccatgacgcgcccgcaactgaagctgaaaaacggcgcagcgaaaggagagcaggcatga

SEQ ID NO: 535 - protein, 425 aa, Escherichia coli
MKPMHIAMALLSAAMFFVLAGVFMGVQLELDGTKLVVDTASDVRWQWVFIGTAVVFFFQLLRPAFQKGLKSVSGPKFILPAIDGSTVKQKLFLVALLVLAVAWPFMVSRGTVDIATLTMIYIILGLGLNVVVGLSGLLVLGYGGFYAIGAYTFALLNHYYGLGFWTCLPIAGLMAAAAGFLLGFPVLRLRGDYLAIVTLGFGEIVRILLLNNTEITGGPNGISQIPKPTLFGLEFSRTAREGGWDTFSNFFGLKYDPSDRVIFLYLVALLLVVLSLFVINRLLRMPLGRAWEALREDEIACRSLGLSPRRIKLTAFTISAAFAGFAGTLFAARQGFVSPESFTFAESAFVLAIVVLGGMGSQFAVILAAILLVVSRELMRDFNEYSMLMLGGLMVLMMIWRPQGLLPMTRPQLKLKNGAAKGEQA

SEQ ID NO: 536 - DNA, 861 bp, Synechocystis sp
  CDS (1)..(861)
atggatctatcacagttaatctttaatggcattgcggtgggaagcattatcgccctgggggcagtggggttgaccctgacctatggcattttacgcctgtctaattttgcccatggtgattttatgactttggcggcctatttaacttggtgggccaacaccagcggcattaatttgtggttatccatggccctgggttgtgtcggtaccatcattgccatgttcattggtgaatggttgctctggaagcccatgcgggcccggcgggctacggcaacaacgctgatcattatttccattggtctagccctatttctccgcaacggcatcctcttgatctggggtggcaataaccaaaattaccgagtgcccattgtccctgcccaggattttatgggcattaaatttgagtattaccgtctactggtcattgctatggcgatcgccgccatggtggtgttgcatttgattttgcaaaggacgaaagtgggcaaagcgatgcgggccgtggcggacaatgttgatctggcgaaagtatccggcatcaacgtggaatgggtagtgatgtggacctgggtaatgaccgcagtgttaacagccctaggaggatccatgtatggcctgatgaccaccctgaaaccgaatatggggtggtttttgattttgcccatgtttgcttcggtgattctagggggcattggtaatccctacggggcgatcgccggggggataattattggcgtagcccaggaagtgagcgtgccttggtttggcaccagttacaaaatgggggtggcattgctgttgatgatcatcattttgttcattcgtccccaaggtttgtttaaaggcactcaataa

SEQ ID NO: 537 - protein, 286 aa, Synechocystis sp
MDLSQLIFNGIAVGSIIALGAVGLTLTYGILRLSNFAHGDFMTLAAYLTWWANTSGINLWLSMALGCVGTIIAMFIGEWLLWKPMRARRATATTLIIISIGLALFLRNGILLIWGGNNQNYRVPIVPAQDFMGIKFEYYRLLVIAMAIAAMVVLHLILQRTKVGKAMRAVADNVDLAKVSGINVEWVVMWTWVMTAVLTALGGSMYGLMTTLKPNMGWFLILPMFASVILGGIGNPYGAIAGGIIIGVAQEVSVPWFGTSYKMGVALLLMIIILFIRPQGLFKGTQ

SEQ ID NO: 538 - DNA, 1167 bp, Synechocystis sp
  CDS (1)..(1167)
atgtcagtactcctagaaggcatttttaacggtttaagcacaagttcagtgttactgattgctgccctgggtttggcgatcgtctttggtctgatgggggtaattaacctggcccatggggaattgatgatgttgggcgcttacagcacctttgtggtgcaaaacctcttccagagcctcggtgacccttggtttgacctctacatttttgccgctctgcccgttgctttcctggtggcggcgatcgccggtctagttttggaaagacaggttatccgctacttgtacggccgaccgctggaaacattgctggccacctggggggtgagcctgattttgcaacagtttgtccgcagtgtgaactggattatggtgctggtggtgggtatatttttgcttttatatttcggtggcacctggttaattaaacgccaggccggtggcaaaccttggttagggaaagcccaagtcatccttttctttctctcagcggcgatctccggcattagtggttttgtggtggcccaggccaattctcccctgtggaatcgggcttggtttggagctaggaacgtcaatgttagtgcccccacttggttgcggggggggcttgccattggcactttccaggtaccctacaccaggatttttataattttcctgactctgctctgtttactggcggtgtatctaattttctaccgttctaattggggactgagaattcgagccgttacccaaaaccggggtatgagtgcttgtttgggtattcccactgggcaggtggatgctttgacctttgcccttggttctggcctagcgggcattgcaggctgtgccattagttttctgggggcggtggggcccaacattggtcaaaactacattatcaataccttcatggtggtggtggtagggggcgtaggtaacctactcggaaccattattgcttccctggcgatcggtgtatccagtgacttgattggtagtggcaccctgattcgtttattccccccagagggagcattgcaacctctgtacgaattttttaccttttttgccaccaccagtatggccagggttttagtcttcgccctgattatcctttttctgcaaatcaagccagcgggtattttccctcccaaaggccggacggcggaattgtag

SEQ ID NO: 539 - protein, 388 aa, Synechocystis sp
MSVLLEGIFNGLSTSSVLLIAALGLAIVFGLMGVINLAHGELMMLGAYSTFVVQNLFQSLGDPWFDLYIFAALPVAFLVAAIAGLVLERQVIRYLYGRPLETLLATWGVSLILQQFVRSVNWIMVLVVGIFLLLYFGGTWLIKRQAGGKPWLGKAQVILFFLSAAISGISGFVVAQANSPLWNRAWFGARNVNVSAPTWLRGGLAIGTFQVPYTRIFIIFLTLLCLLAVYLIFYRSNWGLRIRAVTQNRGMSACLGIPTGQVDALTFALGSGLAGIAGCAISFLGAVGPNIGQNYIINTFMVVVVGGVGNLLGTIIASLAIGVSSDLIGSGTLIRLFPPEGALQPLYEFFTFFATTSMARVLVFALIILFLQIKPAGIFPPKGRTAEL

SEQ ID NO: 540 - DNA, 1233 bp, Synechocystis sp
  CDS (1)..(1233)
atgcaaaattctgcccccccttctggttctcccctggccaaactgctgaagaagttgggttggaatgactatgcgttgttcgggtcagtgttggtttttgcctgtattcccctgatcatcgcagttttatctttgtccgatggaggcccaagtcaatggctgttgaataattttcctttcctacggctcaggttgatggggcgttttctgtctttggctattattgccctgggcattgacctaatttggggctacacggggttactcagtttaggtcatggcatattttttgcccttgggggttatgcctttgccatgtatctcaatctccagttaccggaagggcaattacctgaattttttggtctctacggggtggataaactgccactgatttggcaacctttccattcgttacccgttactgtattggccatggtgttggtgccaggggcgatcgccgccctgttgggttatttaatttttcgtaaccgcatcaagggtgtatatttttcgattttgacccaggcggctctgttggtgttttacaactttttcaacgggcaacagaaattaattaacggtactaatggcttaaaaactgatacagaaagaatttttggttacctagccagttccgacggagtccaactggtattttatgaagtcaccgtcctggctctgttattggtttatattctttgccgttggcttactagtgggcgctttggccgcatcctcgtagccattcgggacgatgaaaccagggtaagatttaccggttacgatcccactggcttcaaggtgttggtatttggcatttccggggcgatcgccggtctgtcgggggggctatacacagtgcaaacggggattattactccgagcattatggatgtggccttttccattgaaatggtcatttgggttgcggttggcggcagggctaccctagtgggggctgtgttgggaaccctgttggtgcgcctagcccagagcagtttgagcgagcagtttcccgaggtttggctgtttttccaaggggctttgttcctgattgtagttactgtgcttcccaacggcattgtcggttggtggcaagaacagggcattgtgcaactcaggaatttgttccgaggtaaaccccagttggccacctttcctagtttggaagaagatcctttggtgcaggaagaacgcaaacagtttgaaggagagtctaaggaaccgtaa

SEQ ID NO: 541 - protein, 410 aa, Synechocystis sp
MQNSAPPSGSPLAKLLKKLGWNDYALFGSVLVFACIPLIIAVLSLSDGGPSQWLLNNFPFLRLRLMGRFLSLAIIALGIDLIWGYTGLLSLGHGIFFALGGYAFAMYLNLQLPEGQLPEFFGLYGVDKLPLIWQPFHSLPVTVLAMVLVPGAIAALLGYLIFRNRIKGVYFSILTQAALLVFYNFFNGQQKLINGTNGLKTDTERIFGYLASSDGVQLVFYEVTVLALLLVYILCRWLTSGRFGRILVAIRDDETRVRFTGYDPTGFKVLVFGISGAIAGLSGGLYTVQTGIITPSIMDVAFSIEMVIWVAVGGRATLVGAVLGTLLVRLAQSSLSEQFPEVWLFFQGALFLIVVTVLPNGIVGWWQEQGIVQLRNLFRGKPQLATFPSLEEDPLVQEERKQFEGESKEP

SEQ ID NO: 542 - DNA, 933 bp, Streptomyces coelicolor
  CDS (1)..(933)
atgaacgaactgccgcagcagctggtcaacggcctgctactgggatccatgtacgggctcgtcgccatcggctacacaatggtctacggcatcgtccagctcatcaacttcgcccacggcgagatcttcatgaccggtgccttcggcgcactcacggtctacatgtacatcctgcccgacggcacctccatgctgatcgccctgcccctgatgctcatcggcgcggtgatcgtctccaccaccgtcgccgtcggggcggaacggttcgcctatcgccccctgcgcggcgcaccccggctcgcgcccctcatcaccgcgatcggcctctccctcgccctgcagcaggcggtgtgggcctggtacccggacgcgaagtccgcgcggcccttcccgcagatcgacggcgggcccttccacatcggcaacgtcaccctccagaccggcgacatcttcctgttcgtcgtcgccccggtgagcatggccatcctcggcttcttcgtgatgcgcacccgcaccggacggggtatgcaggccaccgcccaggacccggacaccgccaagctgatgggcgtcgacacggaccgcatcatcgtgatcgccttcgccctcggcgccgtcttcgccgccgtcggaggcgtcgcctacggcctcaggtacggccagatcgagttcaagatgggcttcatcctcggtctcaaggccttcacggcggcggtcctcggcggcatcggcaacatctacggcgccatgatcggcggtgtcgtcctcggcgtcgccgagaccctggccaccgcctacatcgccgacgtccccggcctggacaagttcggcagccagtcctgggcggacgtctgggccttcatcctcctcatcctcgtgctgttgttcaggccacagggcctgctcggcgaacgcgttgcggacagggcgtga

SEQ ID NO: 543 - protein, 310 aa, Streptomyces coelicolor
MNELPQQLVNGLLLGSMYGLVAIGYTMVYGIVQLINFAHGEIFMTGAFGALTVYMYILPDGTSMLIALPLMLIGAVIVSTTVAVGAERFAYRPLRGAPRLAPLITAIGLSLALQQAVWAWYPDAKSARPFPQIDGGPFHIGNVTLQTGDIFLFVVAPVSMAILGFFVMRTRTGRGMQATAQDPDTAKLMGVDTDRIIVIAFALGAVFAAVGGVAYGLRYGQIEFKMGFILGLKAFTAAVLGGIGNIYGAMIGGVVLGVAETLATAYIADVPGLDKFGSQSWADVWAFILLILVLLFRPQGLLGERVADRA

SEQ ID NO: 544 - DNA, 861 bp, Rhodopseudomonas palustris
  CDS (1)..(861)
atgagtcttattctgatccaggcgctgaacggcctacagaccgggctggtgattttcctggccgccagcggcctgaccctggtgttcggcattctcggcgtcatcaatctctcgcacggctcgttctacatgctcggcgcctatttggcgctctcgctgaccggcatgttcggcgatgtctttctggcgctggtcgccggcatcccgctcgccttcctgcttggtctggcgatcgagtggctgttcatccgccatctctacgaccgcgaccacctgcagcaggtgctgctgaccttcgcgctgatcctgatcttcaatgaatttcagcaagtggtgtgggggtcgtatccgcactcgatcccggcgccgagctatctggccaacagcgtccggctcaccgaaggtctgagttacccggtctatcgattggcgctgatggcgatctgcgtcgcgctggcgattgcgatggcgctggtgatccagaagacccggatcggccgcctgatccgtgccgccgagtccaatcgcgagatggtcgaagcgctcggcttcgactcgcggctgatcttccggatggtgttcgccaccggtgtcgcactcgccgccaccgccggcatgctcgcggccccaatcgagagcgcctatccgggcatcggcgatcgcgtgctgatcgtctcgttcgtggttgtggtgatcggcggcatcggttcggtacgcggcgctttcattggatcgctgctgatcggcatggccgacgccttcggcaaggtgttcctaccgcagttctccagcatcatcatctacgcgttgatggcgctggtgctggtgatacgcccggccgggctgttcgggcgggcctga

SEQ ID NO: 545 - protein, 286 aa, Rhodopseudomonas palustris
MSLILIQALNGLQTGLVIFLAASGLTLVFGILGVINLSHGSFYMLGAYLALSLTGMFGDVFLALVAGIPLAFLLGLAIEWLFIRHLYDRDHLQQVLLTFALILIFNEFQQVVWGSYPHSIPAPSYLANSVRLTEGLSYPVYRLALMAICVALAIAMALVIQKTRIGRLIRAAESNREMVEALGFDSRLIFRMVFATGVALAATAGMLAAPIESAYPGIGDRVLIVSFVVVVIGGIGSVRGAFIGSLLIGMADAFGKVFLPQFSSIIIYALMALVLVIRPAGLFGRA

SEQ ID NO: 546 - DNA, 918 bp, Methylophilus methylotrophus
  CDS (1)..(918)
atgtttggttattcgatggcagatataggcaatattgtggtgatgcagggcttttccggcctgagcatgtttacagtgttgctgctgatggcacttggtctcgcgattattttcgggcagatgggtgtgattaacatggcacatggcgagtttatgaccataggcgcctacaccaccgtactcatttcaaaagtagcagccagttacggcttcacggattactacttcgtgtttgccattgcgattgccttcttgctggccttcgcggtcggttactttgttgaattcattatgatcaggcacttgtataagcggccgctggatacgctactggccacctggggcttgaatctggtcatgcaacaaattttccgctcttcattcggcgccaaagaagtgagtgccgaactgcctgagtggatgctgggctctttcaagccaacccctgatattgatatcccgattaacggggtattcgtgatggtgctggcggcgctagtgactttcggtgtctacatgtttatgtacaaatcccgctggggcttgcgtgtacgtgccacggtgcagaaccgtaccatggctggcgcagtagggattaatacagccaaagttgaccgcgtcacttttgccctgggctgcggcattgccgggattgccggtgctgcatttaccaccattgcctctactggcccgaccacagggaccttgtatatcgtggacagctttatggtcgtggtatttggtggcgcagccagcattgtcgggacgattgcttccgccttcgggattgcccaggcgcaatcgatactgcaattctttatgaccagctctatgggtaaggtctccaccttgctcgtcatcgtcaccatcctgatgatgaaaccggaaggtctgtttgcctccaaactgcgtaaataa

SEQ ID NO: 547 - protein, 305 aa, Methylophilus methylotrophus
MFGYSMADIGNIVVMQGFSGLSMFTVLLLMALGLAIIFGQMGVINMAHGEFMTIGAYTTVLISKVAASYGFTDYYFVFAIAIAFLLAFAVGYFVEFIMIRHLYKRPLDTLLATWGLNLVMQQIFRSSFGAKEVSAELPEWMLGSFKPTPDIDIPINGVFVMVLAALVTFGVYMFMYKSRWGLRVRATVQNRTMAGAVGINTAKVDRVTFALGCGIAGIAGAAFTTIASTGPTTGTLYIVDSFMVVVFGGAASIVGTIASAFGIAQAQSILQFFMTSSMGKVSTLLVIVTILMMKPEGLFASKLRK

SEQ ID NO: 548 - DNA, 1845 bp, Pseudomonas aeruginosa
  CDS (1)..(1845)
atgaccgaccaggaggagacatctgacaacactggtattttcccagctgttgaatgggctgcaatacggcgtcctgctgtttttgctggccgccgggtgacgctggtgttcggcatcatgagcttcgtgaaccttgctcacgggtcgctctatatgctgggcgcctactttgcggcactcacattcaaaaataccgactccctgacgctggctttttttgcggccattttcggcagcattgccgtaggcgttattcttgagcgcctggctgtatcaaggctttactcgcgagaccacctcgaccatgtgctggtgactttcggcatggtgctcttcttcaacgagatggtgcaaattctctggggcacacaacagtatttcttgcctgtccctgcgtggctcgatagtacggtcagtattttcggcataaattaccccgcttatcgctttgccattatcgtggttgggcttttggtggcggtaggcgctcacgcggttattaacaaaactcgtctgggtatgctgatacgagccggttctgttaaccccaaaatggttggcgctcttggcgtcaacattaagtttctgaacgccttgttgtttggtttgggggcggcattggcggggctggctggcgtaatggccagtccaatcctgtcgattcagtccggcatgggcgatccggtacttatcacgacgcttgtcgtcatcgttattgggggtattggttcggttagcggtgctttttacgccgcattaatcgtcggtgttgtcgacacgctcggccgtgcattcttacccatgattttgcgcgaattcatggcgcgagacattgccaatgctgcagggcccgcaatcgcctcaatgcttatttatgtcctgatggcggttgtgcttgcgcttcgcccacaaggactgtttcggcgcccggagataacgatgacgcaaacaacaccattcaagttaagtacgctggttcccgtcgcaattattcttttgttggcgctggtgcctttttggggttatttcaccgacagcactttttacgtcgcgttctatgcgcgtgtgcttatttacgctatcgcagtggttgcgctaaacatcgccttagggtttggcgggttggtcagccttggtcacgcgttgtttatgggtatcggtgcatacagcgtcgccataccgtcgttctacggcattgacagtggctgggtgcatctgttcatttgccttctgggcagcggtctgttgggttacatcaccggcgcgatcagtctgcgcactacaggcatcgggttcatcatgatcacgctggcgtttgctcagatggggtacttcctgtttgtcagtcttaagcagtacgggggcgacgacggcacaagcattgccaataccagcaaaatgcttgggctcgattttggcggtgtctataccgtttacgtgtggcgtttgtgctgctggtgctgtcaacctggtggacggcaaagctgcgtgtctcgccttttggcatggtcttgcgtggcgcacgccaaaacatccgtcgtgttaacgctatcggtttccaggcgcataatatttgttggtgtcttacgtgctgtcggcaatgctgtgctcggtggcggggttcttgctggccaatctcaatgccttcgcgtcacccaccaccttatcctggattatttcaggcgatctggtggttatgctggtactgggcggcattggtaccgtatttggcccgttgttaggggcacttgcgttcttgggtctcgaagaagtgctgaaaatgtttacaacgcattggttggccgtgtttggtctggccattgttgtgattggcctggtgggtaa

SEQ ID NO: 549 - protein, 614 aa, Pseudomonas aeruginosa
MTDQEETSDNTGIFPAVEWAAIRRPAVFAGRRVTLVFGIMSFVNLAHGSLYMLGAYFAALTFKNTDSLTLAFFAAIFGSIAVGVILERLAVSRLYSRDHLDHVLVTFGMVLFFNEMVQILWGTQQYFLPVPAWLDSTVSIFGINYPAYRFAIIVVGLLVAVGAHAVINKTRLGMLIRAGSVNPKMVGALGVNIKFLNALLFGLGAALAGLAGVMASPILSIQSGMGDPVLITTLVVIVIGGIGSVSGAFYAALIVGVVDTLGRAFLPMILREFMARDIANAAGPAIASMLIYVLMAVVLALRPQGLFRRPEITMTQTTPFKLSTLVPVAIILLLALVPFWGYFTDSTFYVAFYARVLIYAIAVVALNIALGFGGLVSLGHALFMGIGAYSVAIPSFYGIDSGWVHLFICLLGSGLLGYITGAISLRTTGIGFIMITLAFAQMGYFLFVSLKQYGGDDGTSIANTSKMLGLDFGGVYTVYVWRLCCWCCQPGGRQSCVSRLLAWSCVAHAKTSVVLTLSVSRRIIFVGVLRAVGNAVLGGGVLAGQSQCLRVTHHLILDYFRRSGGYAGTGRHWYRIWPVVRGTCVLGSRRSAENVYNALVGRVWSGHCCDWPGG

SEQ ID NO: 550 - DNA, 1860 bp, Symbiobacterium thermophilum
  CDS (1)..(1860)
atggcggcgcctttgcgatctggaacccgtaggagggggagcatgctggaccagctgatcaacggcctggtggttggcaacctctacgccctcacggcggtgggcatcacccagatctacggcgtggccaacgtgatcaacttcgcccacggctccctctacatggtcggcgccttcgtgggctggatggcggtcacctggctgggcctgccgctactgcccaccctgctgctcgtgctcgtcgcctcggccctgctggggctggcggtggagcgggtcgccatccgccccttcgccggttctggccggacggtgctgctgctcaccaccatcgccgcggggctcgtcctggagcaggcggcccagctgatatgggggccggagaccaaggccttccacacccccttcgccgacgtgcgggtccgggtgggcggcggcttcctctcctccctggacctggtgatcctggctgtgggcttgaccaccgctctggcgctctggctcttcctgaagcggtcccgcctgggctgggcggtccgggccaccgcccaggaccgggaggccgccctgcagatgggcgtcgacgtgaaccaggtcagccgggtcagcttcgccatggccggcgccctggccggggtgagcgggctcctggtggggctgtactaccacagcgtctaccccaccatgggcttctccgcgagcctgaagggattcacggcggccctgctgggcggattgggcaacatccccggcgcgctggtgggggcgtacctgctgggaacggcggagtcgctggcggtggcctggctgggctccacctggcgcgacctggtgggcatcggactgctgctcggcgtgctgcttttccgccccaacggcctgttcgcggccgcccgggcgctgctgcccgagcccactgccggcactttcatcccgatcgggcggccgctgcctatcccccggtgggcgctgcccgcggcgggggccgtcgccctggccctgccgctggtggtgcggaacgggtactggctgcaggtgctggcgaccgcctggatcttcggcctgctggccatcagcctcaacctgattgccgggacggccgggcagatctccctcgggcacgccggcttcctggccctgggggcgtacgcctcggccatcctcaccacccggctgcagtggcccttcctgctgtcgctggctgtcgcgcccgtcatcgccgccgccgtcggcgtggtgctttgctacccggccctgcggctccgggggcagtacctggcggtggccaccatcggcctgggccaggggatcgcgctggtggcgctcaactggacggcactgacccgggggcccctgggcatcagcaacatcgccccgcctggcctcttcggagtggagatcacctcggccgcggggttctactggctgaccctgaccctgctgctgggcggcatctgggtggcggagcggctctccggctcgtacctgggccgggcgctgcgggccgtgcgggaggacgaggtggccgcccgggcgtacggggtggggctggagcggtacaagtccatcgccttcggcctcagcgccttcatcgcgggcctcgccggcgtcctgctggcgcacgcctacacctacatcgcgccggacacgttcacccacgcgatgtcgctgcaggtgctgacgatggtggtgctgggcgggctggacaacaccatcggcgccgtggcgggggccctcgccctgatcgtcatccccgagtccgcccggttcctggcggagtaccggttcctggtctacggcctgctgcttctggtcatgctcaggttccggccccggggcctcctgagcgccgcatcgtga

SEQ ID NO: 551 - protein, 619 aa, Symbiobacterium thermophilum
MAAPLRSGTRRRGSMLDQLINGLVVGNLYALTAVGITQIYGVANVINFAHGSLYMVGAFVGWMAVTWLGLPLLPTLLLVLVASALLGLAVERVAIRPFAGSGRTVLLLTTIAAGLVLEQAAQLIWGPETKAFHTPFADVRVRVGGGFLSSLDLVILAVGLTTALALWLFLKRSRLGWAVRATAQDREAALQMGVDVNQVSRVSFAMAGALAGVSGLLVGLYYHSVYPTMGFSASLKGFTAALLGGLGNIPGALVGAYLLGTAESLAVAWLGSTWRDLVGIGLLLGVLLFRPNGLFAAARALLPEPTAGTFIPIGRPLPIPRWALPAAGAVALALPLVVRNGYWLQVLATAWIFGLLAISLNLIAGTAGQISLGHAGFLALGAYASAILTTRLQWPFLLSLAVAPVIAAAVGVVLCYPALRLRGQYLAVATIGLGQGIALVALNWTALTRGPLGISNIAPPGLFGVEITSAAGFYWLTLTLLLGGIWVAERLSGSYLGRALRAVREDEVAARAYGVGLERYKSIAFGLSAFIAGLAGVLLAHAYTYIAPDTFTHAMSLQVLTMVVLGGLDNTIGAVAGALALIVIPESARFLAEYRFLVYGLLLLVMLRFRPRGLLSAAS

SEQ ID NO: 552 - DNA, 1050 bp, Symbiobacterium thermophilum
  CDS (1)..(1050)
atggcgaccgtgccgaatggcagcagctccttcgccggcggcgggcggccggcggtgacggtgaacgcggtggtctccgccgcgctgatcgtcgccctgtacatcgtgctctccctgctgcggcagcagggcatcatcggcacctactggggcatgatcctggacctggccctgatcaccaccacctcggcaatcggtctcagcctgatctacggcttcgccggccagttctcgctggggcacgtggccttctacggcatcggcgggtatgtgtcggcctacatcaccaaggcctacggcgccacgaccctcaacttcgtgctgggcctcgccgccggcaccctcgcggcggccctgatcgcgttcctgatcggcctgcccatcctccggctgcggtcggactacctgggcatcgccacgctgggcttcggcgtcatcgtcaaggtgttcatggacaacagcgacaagatctccaagctgctgggcggctccatgggcatgaccggcatcccgcgcctcaccacctttccctgggtgttctggtcggcggtgctggtgatcctgctggcccggaacctggtccactccagccacggacgggcgtgcatcagcgtgcgggaggacgagatcgccgcggacatcatgggcatcgacaccacccggttcaagatgctggccttcgtcctgggctgcgccatggccgggctggcgggcggcctgtacgctcacctgtatgtctacctgcacccgaagagcttcgagttcctgaagtccttcgacgtgctcctgatcgtggtgctggggggcctgggcagcctgaccggcacggtggtggccggcatgggcgtggtgttcctgcaggaggtgctgcgggacgtgctgggccagcagttcctggagtggcgcggcgtggtctacgccctggtgctgatcgtgctgatgatcctgcgcccgcaggggctcatgggcggctgggagttcagcctcgaccggtggctttcgcgtccgtcgaagggagggaaggccagtggcactgctggaatgccgtga

SEQ ID NO: 553 - protein, 349 aa, Symbiobacterium thermophilum
MATVPNGSSSFAGGGRPAVTVNAVVSAALIVALYIVLSLLRQQGIIGTYWGMILDLALITTTSAIGLSLIYGFAGQFSLGHVAFYGIGGYVSAYITKAYGATTLNFVLGLAAGTLAAALIAFLIGLPILRLRSDYLGIATLGFGVIVKVFMDNSDKISKLLGGSMGMTGIPRLTTFPWVFWSAVLVILLARNLVHSSHGRACISVREDEIAADIMGIDTTRFKMLAFVLGCAMAGLAGGLYAHLYVYLHPKSFEFLKSFDVLLIVVLGGLGSLTGTVVAGMGVVFLQEVLRDVLGQQFLEWRGVVYALVLIVLMILRPQGLMGGWEFSLDRWLSRPSKGGKASGTAGMP

SEQ ID NO: 554 - DNA, 870 bp, Symbiobacterium thermophilum
  CDS (1)..(870)
atgatcttcgcccagcagatcatcagcggcctggccacgggttcgctctacgccctggccgccctgggcctggtgctgatcttcaagaccaccgacgtggtcaacttcgcccagggcgagatggccatgttcggcaccttcatcatgttcaccctgctgaagaccgccggcctcccctactggggcgccttcgtgctggcgctggccttcgccttcctgatgggcgccgtcatcgagcgggtggcgctgcgccccctggcccaggcccccctcatcagcgtgctgatcgcgacgctggggctgatgcagatcatcaacggggtggccggctggatctggggctaccaggccaggccgttcccgacggcggtgagcggcagccccatccgcctgggcgacctggtgatcaccttgccggacctggtcaacctcgccgtcagcctcgtggtgatgaccggcttcttcctcctcttcaagttcaccaagctgggcatcgccatgcgggcggtggccgaaaaccgggtggcggcccgcctgatgggcatccccaccgaccgcatcctctccctcacctgggggctgggaggcgtcctggccgccaccgccggcatcctcatcgccccggtgaccaacctggacatcaacatgatggccgacatgcagatcaaggcgttcaccgccgcggtgctgggcgggttcacctcgctgcccggcgccgtggtgggcggcctcaccctcggcgtgctggagaacctggtcggccagttcgtcccgcagctgaaaaccccctttgccttcggcctcatcgtgctggtgctgatgctgaggcccagcggcctgatggggaccgtccagcgaaagaaggtgtag

SEQ ID NO: 555 - protein, 289 aa, Symbiobacterium thermophilum
MIFAQQIISGLATGSLYALAALGLVLIFKTTDVVNFAQGEMAMFGTFIMFTLLKTAGLPYWGAFVLALAFAFLMGAVIERVALRPLAQAPLISVLIATLGLMQIINGVAGWIWGYQARPFPTAVSGSPIRLGDLVITLPDLVNLAVSLVVMTGFFLLFKFTKLGIAMRAVAENRVAARLMGIPTDRILSLTWGLGGVLAATAGILIAPVTNLDINMMADMQIKAFTAAVLGGFTSLPGAVVGGLTLGVLENLVGQFVPQLKTPFAFGLIVLVLMLRPSGLMGTVQRKKV

SEQ ID NO: 556 - DNA, 1026 bp, Symbiobacterium thermophilum
  CDS (1)..(1026)
atgggcaagaagctgctcttcctcctgggcgccctggccgtgctggcgctgccctacgcgctgcctgacgaatggtcgtggctggtgctgctcaccaaccgggccctgatcctggccatcgcggccatcggcctcaacctgctcaccggcttcgccggccagatctccatcggccacgcggccttcatggccatcggcgccttcgccagctacggcctcaccgccaaggtcggcattcccttctggggcgccctgccgctggcagggctgatcagcgccgccgtgggctacgccctgggcttcccggcgctccggctgcagggccactacctggccatcgccaccctgggcttcggcgtggcggtgccccagatcctcaacctctggaaggggctctccggcggctggaccggggtgaagcccgccgccccttacctctatggcctctacttcaaggaggaccgcccctactactacctgatcctgatcgccctggccctcctcacctgggtggccctgaacatcgccagacggcgcaccggtcgggccttcatcgccctgcgggacagcagcgtcgccgcgcaggcgatgggcatcagcctggcccggtacaagaccaccgccttcgccctctcggcgttctacgccggcatcgccggcagcctctgggcccacatgatgaactacatcgccccccacgacttcaacctggccctgtcgatggagctgttcaccatcatcgtgctgggcggcctggcctcggtgcccggctcgatcgtgggttcgctgttcatgtccctgatgcccaaggccgtggaacggatctcgctggcgcttcagcggtcgggggccttcgaccattccccgttcctcatgaacgtcttcaagaacctgaatcaggtgctgacgggcgtcatcctggtgctggtggtgctctacctgcccctggggctcgtggacctgtggcggaggctgcagcactggtgggccgggcgccggcacgccgcggccgggggggtggagtag

SEQ ID NO: 557 - protein, 341 aa, Symbiobacterium thermophilum
MGKKLLFLLGALAVLALPYALPDEWSWLVLLTNRALILAIAAIGLNLLTGFAGQISIGHAAFMAIGAFASYGLTAKVGIPFWGALPLAGLISAAVGYALGFPALRLQGHYLAIATLGFGVAVPQILNLWKGLSGGWTGVKPAAPYLYGLYFKEDRPYYYLILIALALLTWVALNIARRRTGRAFIALRDSSVAAQAMGISLARYKTTAFALSAFYAGIAGSLWAHMMNYIAPHDFNLALSMELFTIIVLGGLASVPGSIVGSLFMSLMPKAVERISLALQRSGAFDHSPFLMNVFKNLNQVLTGVILVLVVLYLPLGLVDLWRRLQHWWAGRRHAAAGGVE

SEQ ID NO: 558 - DNA, 1068 bp, Desulfotalea psychrophila
  CDS (1)..(1068)
atgaaaaataatatctccttgtttttgtttgtgatagtcattgttggccttcatcttcttaccgccagtacgggttctctctacctactgacccagttgaccatgtccgcatattattccctgctggccataggcctctgcctgcttatgggccatgctggacagatatccatgggccatgccggtttctttgccattggtggctatctgtcggccagtctcaccactcataatatggtctcctctgctgaaacaggctgggtgcaaggcctctcatctctcggccttttacatgcaggcgaggatatgttcggtgatgccctcctcgtcttggcgccatggcctgcctgcctaatggctattgccgttgccgctctggtggccctcctgcttggcattcccatcttgaagctcaagggccattatcttgccatggcgaccctgggctttggcattattgtctaccgcctggtcctggccacggaattttttggtgaggcagatggcatttccgatgtacctgcctttgctatcctgcctggcttgagcattgttggagatttggatgtgcgggtggaaaattattatattgccgccgtaatcctcttcttcggctttgtccttttaagaaatctgaccaggtctcgggtaggtagggccttacgggcaatacacagcgccgaagatgcggccgattccatggggataaatgttgcccactataagttgattacctttgttctatccgccgtttttgccgcctttgccggtgtttgtctgactcactataacggtggcatcgggccttcggaggcggggatgatgaaatccgttcgttatgtggccattgttgccgtgggaggaatggcaaatctctggggagtgctgaccatgagcatggtgctgaactacctctcccttcgtggcatctttggcagttatgatgatgccgtttttggcaccgtcctggtcttggtgatgctctttgctcccgatggaatttttagcattaagcttcgtgccggtcttgcccaactccgggcgaaatatggagaggatctctcatga

SEQ ID NO: 559 - protein, 355 aa, Desulfotalea psychrophila
MKNNISLFLFVIVIVGLHLLTASTGSLYLLTQLTMSAYYSLLAIGLCLLMGHAGQISMGHAGFFAIGGYLSASLTTHNMVSSAETGWVQGLSSLGLLHAGEDMFGDALLVLAPWPACLMAIAVAALVALLLGIPILKLKGHYLAMATLGFGIIVYRLVLATEFFGEADGISDVPAFAILPGLSIVGDLDVRVENYYIAAVILFFGFVLLRNLTRSRVGRALRAIHSAEDAADSMGINVAHYKLITFVLSAVFAAFAGVCLTHYNGGIGPSEAGMMKSVRYVAIVAVGGMANLWGVLTMSMVLNYLSLRGIFGSYDDAVFGTVLVLVMLFAPDGIFSIKLRAGLAQLRAKYGEDLS

SEQ ID NO: 560 - DNA, 891 bp, Desulfotalea psychrophila
  CDS (1)..(891)
atgagtagccagttatttgtccagtatttacttgccggtattacctatggttccatgtatgccattgtcgccataggctttaatattatttataataccacagggattataaattttgctcagggggagtttgtcatgctgggggggatgctctccatctctctcttgcagtttatgcccctgcctttggccattggcctggcagtggtgctgaccatggctgtcggcggtctggtggagatactgtttatccgttggttaaaaaatcccggtgtactgcgcatgattgtgatcaccgttggcctctctattctcctgcgggaaatcgccctccatatttggggtgagggtgtttattcactgccctatttttatggtaatgagatcagcacggtggttattttgggggcacgggtatcaccacagattttatgggtcataggtgtctgtctccttcttgttgtcctgcttcatctttttttcaagacttcccccatggggcgggagatgcgtgcctgtgcggtcaataaaaaggctgccctactctgcgggatcaatgcccgtaatatggtcaccttctcctttatgctcagtgccggtattggtgccctggccggtgcggttatgtcacctattacctatactcagtatgattcgggcgccgcccttgccattaagggttttaccgtggctattcttggtggtctgggcaatctctttggtgccgtggcggcgggaatattgctcggggtgttggaggcattttcggtctctgttctacccctggcctttcaggatgccatcgccattagcctgctccttgttattctctgtgtgcgtccccatggtctctttggctcagcaacggccgccggtttaaaggatttttag

SEQ ID NO: 561 - protein, 296 aa, Desulfotalea psychrophila
MSSQLFVQYLLAGITYGSMYAIVAIGFNIIYNTTGIINFAQGEFVMLGGMLSISLLQFMPLPLAIGLAVVLTMAVGGLVEILFIRWLKNPGVLRMIVITVGLSILLREIALHIWGEGVYSLPYFYGNEISTVVILGARVSPQILWVIGVCLLLVVLLHLFFKTSPMGREMRACAVNKKAALLCGINARNMVTFSFMLSAGIGALAGAVMSPITYTQYDSGAALAIKGFTVAILGGLGNLFGAVAAGILLGVLEAFSVSVLPLAFQDAIAISLLLVILCVRPHGLFGSATAAGLKDF

SEQ ID NO: 562 - DNA, 882 bp, Acinetobacter sp
  CDS (1)..(882)
atgaatttttttctagaagtgctgctcggtggaacactggcaggtgtgatgtattcacttgtggcgataggctttgttcttatttatagagcctcgggagtttttaactttgcgcaaggtgcattggtgctattttcagcattaacctttgtgaatttaactgaacacggtgtgccttttatcgttgcctttgcagtcaccttatttattatttttattgtggtgttactcattgatgcattggtgttaaagcatctagtgaatcgttcagtgattacgctttttatggcgacattaggcttaagttatgtgcttgaggggactgcacaagcagtatggggaacacaggtacatgggctcgacttgggaattagtgatgttcctatcgacttttatggaatccatctaagtaaatttgatcttgttgcaactttgattgcaggcagtcttgtcattattttatcgtttttatttaccaagactcgatttggtatatcgcttagagcagttgctgatgatcctttggcttcacaatctgtcggaattcgattgaattacatctggattttggtgtggagtgtcgctggattagttgcactggtcgctggattactctggggcgcacgtttaggtgtgcaattttcactgtcactcgtggttttaaaagcattacctgtattgatcattggtggatttacgtccattacgggtgccattgtaggtggtttgattattggtgcgagtgaaaagcttgccgagatttatctaggaagtttgatcgggagtggcatagaaaactggtttccatacctcatcgcaattttatttttactgatacgtccgacagggctatttggtgaacaacaagttgcgagggtataa

SEQ ID NO: 563 - protein, 293 aa, Acinetobacter sp
MNFFLEVLLGGTLAGVMYSLVAIGFVLIYRASGVFNFAQGALVLFSALTFVNLTEHGVPFIVAFAVTLFIIFIVVLLIDALVLKHLVNRSVITLFMATLGLSYVLEGTAQAVWGTQVHGLDLGISDVPIDFYGIHLSKFDLVATLIAGSLVIILSFLFTKTRFGISLRAVADDPLASQSVGIRLNYIWILVWSVAGLVALVAGLLWGARLGVQFSLSLVVLKALPVLIIGGFTSITGAIVGGLIIGASEKLAEIYLGSLIGSGIENWFPYLIAILFLLIRPTGLFGEQQVARV

SEQ ID NO: 564 - DNA, 1647 bp, Acinetobacter sp
  CDS (1)..(1647)
atgatgatcaaagattatcggatctgggtggtgttgtgtttagtactacaattagggtgcatttctgcgtgggcagcagaagaaacccatcctgtagctgataatacacctgccattcatagcctacagcaagaagatgcgattcaacagtttgtaaaatctgattttaatactcgtcgaatgatgctcaatcaatggcctgcaagtattgaaatacttgataaacttgtgacttatattgatgaaaatgagttatatacagatagcgcaggacatacctatctattaaaaaatgatgagactttactgagttatccagatgaaaaaattataaaagactggcccgcagatttatcacaagtcactttagtcaatacattgcgtaaagccttaacttttggtcaagcaaaagccaagctgaactctgaagatgcgacccaacgattacgtgcagtcgatattttagaaaataatatttctgagctagatactcaatttatccgacagctttacttaaaagaaaccaataacacagtaaaagcacgtcttgcacagcttaaagcacgactcgattttgatagttctgatattttagtcaaaatcgatgctgtaaaagtgttatcggaatcgaatcgtcctgatgtacttgcgttaatggaacaagaattacaacaaccacaattaaacccagagcttaaagcaaccttacttgatgcaaaaaataaaatcaaaacacgcatacaaatcagtgagtggtctggtcatgtcttttcagggttaagtacagccagtattttgctgctagcagcacttggacttgcaattacttatgggttattaggcgtaattaatatggcgcatggtgagctgattatgattggtgcctataccacatatgtcgtgcaaagcctgtttaaagctcatcttgctcactgggtagattggtatttgctgattgccattccagccgcatttatcgtgagtgcactcattggcatgctgatcgaacgcacgattatacggccgctgtatggtcgtcaattagaaacgttacttgcaacttttggtgtaagtctaattttgatgcaagccgtacgtatggtttttggtgctcaaaacgtggaagtatcaaatatcacatggttaagcggcggtatagcactgacgccaagccttatgctgccttataaccgtattgcgattatcgtgtttacagtcactattttgctgctattggtatttttactcaataaaacacgttttggtttattcattcgcgccgttacccaaaatcgtcaaatggcaagagcggttggaattcgttcggcacgtatcgatatgatggcttttggtctgggatcaggccttgctggactggcaggctgtgctttggcgcaagtgggtaatgttgggccagatctaggtcaaaactatattatcgatgcttttctggtggtggtcgtgggtggtgtaggtcaagtctggggtgctgtattggcagcattgggtttgggcgtaagtggaacaattctagaaattggtttaggtgcagtattggccaaaattattctgttggttcttgtgattttgtttattcaaaaacgtccacaaggtttatttgcaatcaaaggccgttttgtggagtaa

SEQ ID NO: 565 - protein, 548 aa, Acinetobacter sp
MMIKDYRIWVVLCLVLQLGCISAWAAEETHPVADNTPAIHSLQQEDAIQQFVKSDFNTRRMMLNQWPASIEILDKLVTYIDENELYTDSAGHTYLLKNDETLLSYPDEKIIKDWPADLSQVTLVNTLRKALTFGQAKAKLNSEDATQRLRAVDILENNISELDTQFIRQLYLKETNNTVKARLAQLKARLDFDSSDILVKIDAVKVLSESNRPDVLALMEQELQQPQLNPELKATLLDAKNKIKTRIQISEWSGHVFSGLSTASILLLAALGLAITYGLLGVINMAHGELIMIGAYTTYVVQSLFKAHLAHWVDWYLLIAIPAAFIVSALIGMLIERTIIRPLYGRQLETLLATFGVSLILMQAVRMVFGAQNVEVSNITWLSGGIALTPSLMLPYNRIAIIVFTVTILLLLVFLLNKTRFGLFIRAVTQNRQMARAVGIRSARIDMMAFGLGSGLAGLAGCALAQVGNVGPDLGQNYIIDAFLVVVVGGVGQVWGAVLAALGLGVSGTILEIGLGAVLAKIILLVLVILFIQKRPQGLFAIKGRFVE

SEQ ID NO: 566 - DNA, 1059 bp, Bartonella quintana
  CDS (1)..(1059)
atgacaaaatcagcttcaacttttctatcatgtatcagtattctcgttcttatcggttttttgttttatgctgataatcattttaatgactacacacttcgtgtcatcaatcttattgctatcaatgcgatattggcaatttcgcttaatttgatttatggtttcacgggtatgttttctcttggacatgctggcttcatggccattggtgcttatgtatgcgcaattttacttctctctcctgaacaaaaagaaatgatgtggattctcgaacctatagctgagccgttgcattatttgcagttacctttttttgtggctgttgttataagtggtctgtgtgctgcagttatagggttattagttgctcttcctatattacgtcttggtggcgattatcttggaattgcaacattgggttttgcagaaattattcgcattgttattacaaacgcaacatctctaacaaatggttctttgggaatcaaagggatacctcaaaatgctacattatggtggaactatggttggttagcatttacggttacctttattgttctcttactgcgaagcaatgctggtaatgtactgcgcgctattcgtgacgatgaaatcgctgcgaaaacaatgggtatcaacgcttttttctaccgtagcttttcctttactgttggtgcattttttgcagggatcggaggagcattaacggctgctcttatttcaactatcgatcccaaaatgttcaactttctcctaacctttaatattttgatgattgttgttgctggtggtcttggttcgattacaggcagtgttataagtagtgttattgttacagctatgcttgaatggcttcgtatcattgaaagtccatttgacttaggttttatatatattccagaaataccaggacttcgtatggttgttttttctcttttattgttagtaattatcttattttggcgaaaaggattgctgggacaacgtgaattctcatggaattggatttatggttttttgacacgaaagaagctccctaatactgagggaaagctatga

SEQ ID NO: 567 - protein, 352 aa, Bartonella quintana
MTKSASTFLSCISILVLIGFLFYADNHFNDYTLRVINLIAINAILAISLNLIYGFTGMFSLGHAGFMAIGAYVCAILLLSPEQKEMMWILEPIAEPLHYLQLPFFVAVVISGLCAAVIGLLVALPILRLGGDYLGIATLGFAEIIRIVITNATSLTNGSLGIKGIPQNATLWWNYGWLAFTVTFIVLLLRSNAGNVLRAIRDDEIAAKTMGINAFFYRSFSFTVGAFFAGIGGALTAALISTIDPKMFNFLLTFNILMIVVAGGLGSITGSVISSVIVTAMLEWLRIIESPFDLGFIYIPEIPGLRMVVFSLLLLVIILFWRKGLLGQREFSWNWIYGFLTRKKLPNTEGKL

SEQ ID NO: 568 - DNA, 1065 bp, Bartonella quintana
  CDS (1)..(1065)
atgttcatccagtatttttttaatgcactggcattgggatctctttacgggcttattgccattggttatactatgatctatggtattctaaggctcattaattttgttcacggcgatatctttatgctgggggcatattttgttttcttttctacaattagctttatacctgcttgggctgctgttcttcttgtatcattagctattcttatttattattcagtatttatagggtttaaaaaacgcctttcaatttattggggtgttgcttttttaattcttattttagcattcatttattattttaaaattgccccacaagattttacgccaacttggattttagccctctgtttttcaattttcatcacaagtgcagtgggtattactattgatcaatttgcctacaaacctctgcgccatgctccccgtatttcagcgcttattggtgcgataggagtttccttttttattgaaaatcttgctacaattctctttagtggtgttcccaaaggtgtgaaacagccagattttcttgtaacgccgttcttatggcatttagggcaaagttcagatggaatcattagaattgctcctatgtctttgatcgttcccactatttcgtttattcttattgtgttactgctatggattattcataaaacaaaacctggtcttgctatgcgtgcaatctcacatgatatcgaaacgactcgtttgatgggtgtttctgtcaataaagtcattgcattcacatttgggataggctcagcactcgctgctattgcgggtatcatgtgggctctacgctatcctcaaattcaacctcatatgggtgttcttcctggcctcaaagcatttgttgcagctgttatcggaggtattggctcaattccaggagcaatgttggggggactgttactaggatttattgaaattatgattatcgcattctttcccattctatccggataccgagatgccttcgcctttattttattgattctgattttattgatgatgcccactggtttaatgggcaaaaaaagtcaggagaaaatctaa

SEQ ID NO: 569 - protein, 354 aa, Bartonella quintana
MFIQYFFNALALGSLYGLIAIGYTMIYGILRLINFVHGDIFMLGAYFVFFSTISFIPAWAAVLLVSLAILIYYSVFIGFKKRLSIYWGVAFLILILAFIYYFKIAPQDFTPTWILALCFSIFITSAVGITIDQFAYKPLRHAPRISALIGAIGVSFFIENLATILFSGVPKGVKQPDFLVTPFLWHLGQSSDGIIRIAPMSLIVPTISFILIVLLLWIIHKTKPGLAMRAISHDIETTRLMGVSVNKVIAFTFGIGSALAAIAGIMWALRYPQIQPHMGVLPGLKAFVAAVIGGIGSIPGAMLGGLLLGFIEIMIIAFFPILSGYRDAFAFILLILILLMMPTGLMGKKSQEKI

SEQ ID NO: 570 - DNA, 1065 bp, Bartonella henselae
  CDS (1)..(1065)
atgttcatccagtatttttttaatgcacttgcattgggggctctttatgggcttatcgcaattggttacaccatggtctatggtattctaagactcattaatttcgctcatggtgatatctttatgctaggggcgtattttgttttcttttccacaatcagctttatgcctgcttgggctgctgttcttcttatattattggctcttttcatttattattcagtatttatagggtttaaaaaacgccctaaaatttattgggttgctgttttttttgcttttattttaacgttcatttattattttaaaattgctccacaagattttacaccgatttggattttagctctctgtttttcaatttttatcacaagtgcagtgggtattactattgaccagtttgcctataaaccactgcgtcatgctccacgtatttcagcgcttattggtgcaataggagtttccttttttattgaaaatcttgctactgtaatctttagtggtgtcccaaagggtgtaaaacagccagattttcttgtcacaccattcctatggcatttaggatcaggggaaaatggaattattagaattgctcccatgtctctgatcgttcccattgtttcatttattcttatcgtgttattgctatggattatccataagacaaaacctggtcttgctatgcgtgcaatttcccacgatattgaaacgactcgtttgatgggtgtttctgtcaataaagtcatcgcacttacctttgggataggctcagcacttgctgctattgcaggcatcatgtgggctttacgctatcctcaagttcaaccttatatgggtattcttcctggactcaaagcatttatagcagccgttatcggaggcattggttcaattccaggagcaatgttgggggggctgttactaggatttattgaaattatgattgtcgcattctttcctgctctatccggatatagagatgcttttgcctttattttattaattctgattttattagtaatgcccactggtttaatgggcaaaaaaaatcaggagaaaatctaa

SEQ ID NO: 571 - protein, 354 aa, Bartonella henselae
MFIQYFFNALALGALYGLIAIGYTMVYGILRLINFAHGDIFMLGAYFVFFSTISFMPAWAAVLLILLALFIYYSVFIGFKKRPKIYWVAVFFAFILTFIYYFKIAPQDFTPIWILALCFSIFITSAVGITIDQFAYKPLRHAPRISALIGAIGVSFFIENLATVIFSGVPKGVKQPDFLVTPFLWHLGSGENGIIRIAPMSLIVPIVSFILIVLLLWIIHKTKPGLAMRAISHDIETTRLMGVSVNKVIALTFGIGSALAAIAGIMWALRYPQVQPYMGILPGLKAFIAAVIGGIGSIPGAMLGGLLLGFIEIMIVAFFPALSGYRDAFAFILLILILLVMPTGLMGKKNQEKI

SEQ ID NO: 572 - DNA, 1059 bp, Bartonella henselae
  CDS (1)..(1059)
atggcaaaatcagcttcaacttttttatcatgtatcagtattcttttttttatcggttttttattttatgctgataaccattttaatgagtacacacttcgtgtcatcaaccttattgctatcaatgcgatattggcaatttcgcttaatttgatttacggtttcaccgggatgttttctcttggacatgctggattcatggctattggtgcttatgtatgcgcgattttacttctttctcctgaacaaaaagaaatgatgtggattcttgaacctatagctgagccattgcatgatctacagttacctttttttgtaactgttgttgtaagtggtctgtgtgctgcagttgtaggtttattaattgctcttcctatcttacgtcttggcggagattatcttggaattgcaacgttgggttttgcagaaattattcgcattgttattacaaacgcgacatccgtaacaaatggttctttaggaatcaaaggaatacctcaaaatgcgacattatggtggaactatagttggttagtatttacggttaccttcattattctcttactgcgaagcaatactggtaatgtactgcgcgctattcgtgatgatgaaatcgctgcgaaaacaatggggattaacgcttttttctaccgtagcttttcctttactgcaggtgcattctttgcaggtgtcggaggagcattaatggccgctcttatttcaacaatcgatccaaaaatgttcaacttccttctaacttttaatattttgatgattgttgttgctggtggtcttggttcgattacaggtagcattattggcagcattattattacggtcatgcttgaatggcttcgcattatcgagagtccatttgacttaggttttatacatattccagagacaccagggcttaggatggttattttttctcttttattgctcgtcattatcttattttggagaagaggtttattgggacaacgtgaattctcatggagcgggatttatagcttttttacacgcaaaaagttctctaatactgaggaaaagctatga

SEQ ID NO: 573 - protein, 352 aa, Bartonella henselae
MAKSASTFLSCISILFFIGFLFYADNHFNEYTLRVINLIAINAILAISLNLIYGFTGMFSLGHAGFMAIGAYVCAILLLSPEQKEMMWILEPIAEPLHDLQLPFFVTVVVSGLCAAVVGLLIALPILRLGGDYLGIATLGFAEIIRIVITNATSVTNGSLGIKGIPQNATLWWNYSWLVFTVTFIILLLRSNTGNVLRAIRDDEIAAKTMGINAFFYRSFSFTAGAFFAGVGGALMAALISTIDPKMFNFLLTFNILMIVVAGGLGSITGSIIGSIIITVMLEWLRIIESPFDLGFIHIPETPGLRMVIFSLLLLVIILFWRRGLLGQREFSWSGIYSFFTRKKFSNTEEKL

SEQ ID NO: 574 - DNA, 861 bp, Bacillus thuringiensis
  CDS (1)..(861)
atggatgtgttaatcaatttatttgtaaatgggatttcaacagggatgctcatttttttattagcatcaggtctttcccttattttcggtttaatgagtgttctaaactttgcacatggtggtttatttgcatggggagcgtttacaggtgtttggttatttaatatgacaggtagttacgtattagcattaattggagcagtagctatgggaatgttccttggattcattttagaaagattccttattagaccggtatatggaaatcatgttcgccagcttcttgttacgcttggaggaatgcttgtacttagtgaatgtattaaagtattttggggaccaaatccaattggggcaaagttaccgttatggctacaaggaagttttacattcggaggcgttatattaattaaatatcgtctatttgttattttaattgggattatcatttacgttgccttactattattgctcaaaaaaacaaagataggtcttatgatacgcgcaggtgtaatggataaagagatggttcaagcgctcggtattaacgtaaaagcgatattttctttcgtctttttattaggagcagggatggcagcgttgggaggtttcttattagcaccgtattcaggtgttattttcgccgaaatgggtatgcagtatgcgattttagctttcatagtagtaatcattggaggattaggaagcgtacaaggttcagcaattgcttctttaattgtcggattagctggtgcttttacagcgtattttataccggatttatcacttgcaatcaatatgttaatgctactgtttttcttaatcgtgaagccaaatgggcttgttggtgaaaaggggtga

SEQ ID NO: 575 - protein, 286 aa, Bacillus thuringiensis
MDVLINLFVNGISTGMLIFLLASGLSLIFGLMSVLNFAHGGLFAWGAFTGVWLFNMTGSYVLALIGAVAMGMFLGFILERFLIRPVYGNHVRQLLVTLGGMLVLSECIKVFWGPNPIGAKLPLWLQGSFTFGGVILIKYRLFVILIGIIIYVALLLLLKKTKIGLMIRAGVMDKEMVQALGINVKAIFSFVFLLGAGMAALGGFLLAPYSGVIFAEMGMQYAILAFIVVIIGGLGSVQGSAIASLIVGLAGAFTAYFIPDLSLAINMLMLLFFLIVKPNGLVGEKG

SEQ ID NO: 576 - DNA, 972 bp, Bdellovibrio bacteriovorus
  CDS (1)..(972)
atgaaagccttaaaaaacccggcactgacactgctttgtctggcggtcctgggacttggactggattttggcgtcaatgcctacatcaaactgatcctgctttttgccactgtgaactgcctgctgtcgatgagtctgaatctggtcaatggttacaccggacagttttctttggggcacgcaggttttatggcgatcggggcttacttttccgcttacgcttccaccaagtggggctttctgcctgaatccctgcaactgcttcaatcctttgtctttgtcatcggtgcgggtcttgccgctgcggtggctggctttctggtgggtctgccttcattgcgtttgaagggtgactatctggccattgtcactctgggttttggcgaaatcatccgcgtggcgctgctgaatatggatttcctggggggaccgcgcggtctttccggcattcccagctttggttcattcccgtttgcctttatgtttgcatccgtgtggctggtgatttgtttcttcaccatctggcgggtcatgcattccagtcacgggcgcgggttcttgagtgtgcgtgaagacgagatcgctgcggaagccatgggtatcaacaccacccgcatgaaagtaaaagcttttgtgctttccagcttctttgccggtgtggcgggggctttgtttgcgcactttactaatttcatcaatccatcctctttcaccttcctgcaaagtgtgaatgccgtgatcatggtggttctgggtggcatgggttccatgaccggctccatcgtggcggcggtcatcatcaccgttttgccagaagccctgcgcccgctgcaagaactgaccggtgtggatctgcgcatggtgatctattccctggctttgattctgatgatgattcttcgaccaaaaggtttgttcggggatatggaattcagcgatgtttggagaaaatatgtccgacgttctgcttga

SEQ ID NO: 577 - protein, 323 aa, Bdellovibrio bacteriovorus
MKALKNPALTLLCLAVLGLGLDFGVNAYIKLILLFATVNCLLSMSLNLVNGYTGQFSLGHAGFMAIGAYFSAYASTKWGFLPESLQLLQSFVFVIGAGLAAAVAGFLVGLPSLRLKGDYLAIVTLGFGEIIRVALLNMDFLGGPRGLSGIPSFGSFPFAFMFASVWLVICFFTIWRVMHSSHGRGFLSVREDEIAAEAMGINTTRMKVKAFVLSSFFAGVAGALFAHFTNFINPSSFTFLQSVNAVIMVVLGGMGSMTGSIVAAVIITVLPEALRPLQELTGVDLRMVIYSLALILMMILRPKGLFGDMEFSDVWRKYVRRSA

SEQ ID NO: 578 - DNA, 903 bp, Bdellovibrio bacteriovorus
  CDS (1)..(903)
atgcaggatttcgtacagcatttgatcaacggagtgagccttggatccatctacgcattgatcgccctgggctacacgatggtgtacggaatcctgaaaatgatcaacttcgcccactcggatgtttacatggtgggcgcctttgccgcctactatttcgcccgctggctgggaattgaaaacaaccccggcttcagcactcttctgaccctgattgtaatcacgatgatctgctgcagccttctggggctggtgattgaacgcctggcgtaccgcccgcttagaaactcaccaaaactgaacgtcctgatcaccgccattggtgtcagcttgtttttgcagtattccggtcaggtggtttttggagccgatcccaaagtctttcctgaagtcatgaaagactttgtgatcttctctatcggcatcgttgaagtccgctcttttgatgtgacggttctgggtgtgggcattgttgccatgctgggactgcagttcctgctgttcaaaacaaaaatgggccgtgccatgcgggcggtgagcgccaacccgatggtggccagcctgatgggtgtgaacccggaccgcattattgccttcacgtttgttgtcggatcctctctggccggaattggcagtgttctggtcggcatgaagtatcccaagattgacccgctgatgggcatgatgatcggcatgaaggcgtttgtcgccgcagttctgggtggcatcggcaacgtcggtggtgcggtcctgggtgcgatgatcatgggcctttccgaagaaatggtcgtggcttatctttccagcacctaccgtgatgctttggcctttggaattctgattgtgattctgatctttaagccggcaggtctgctgggtaaatactctgtggagaaggtctga

SEQ ID NO: 579 - protein, 300 aa, Bdellovibrio bacteriovorus
MQDFVQHLINGVSLGSIYALIALGYTMVYGILKMINFAHSDVYMVGAFAAYYFARWLGIENNPGFSTLLTLIVITMICCSLLGLVIERLAYRPLRNSPKLNVLITAIGVSLFLQYSGQVVFGADPKVFPEVMKDFVIFSIGIVEVRSFDVTVLGVGIVAMLGLQFLLFKTKMGRAMRAVSANPMVASLMGVNPDRIIAFTFVVGSSLAGIGSVLVGMKYPKIDPLMGMMIGMKAFVAAVLGGIGNVGGAVLGAMIMGLSEEMVVAYLSSTYRDALAFGILIVILIFKPAGLLGKYSVEKV

SEQ ID NO: 580 - DNA, 1068 bp, Rhodopseudomonas palustris
  CDS (1)..(1068)
atgatgatcctgtccggcgacccgccgcgcagccgggtgctgtcgctgctcctgatcacgatcgtggtggtgctggcgatcacgccgttcgtgtttcccggcgccaagccgctcaacgtcgccgccaagatctgcatcttcgcggccctggtggcgtcctatgatctgttgctcggctacaccggcacggtgtcgttcgcccacaccatgttctacggcatcggctcgtatgctgtggcgatcgcgctgtacggcatggggccgagctgggccgcggtcggcgccggcgtgctgatcggcctgccgctcgccgcgctcttggcgctcgtcatcgggttgttctcgctgcgggtcgaggcgatcttctttgcgatgatcacgctggcggtcgcctccgccttcctggtgctggcgtcgcagctgtcgtggctgaccggcggcgaggacggccgcagcttcagcctgccggagctgctgcggcccggcacggtgttcgtcaaagacttcttcggggtgcggatcaacggccgtatcctgacctactacatcatcctggtcggctgcgccggcatgatcctggcgctgctgcgggtggtgaactcgccgttcggccgggtgctgcaggcggtccgcgagaaccgcttccgtgccgaggcgctcggctatcgcaccgtgtttcatctgacttacgccaacgtgctggcggcgctggttgccgccgccgccggcgtgctgaatgcgatgtggctgcgctatgccgggccggacacctcgctgagcttctcgatcatgctcgacattctcttgatggtggtgatcggcggcatgggcacgatctacggcgccatcatcggcgccaccatcttcatcctggcgcagaactatctgcaggcgctgatgggcgcagcctcaggcgccgccgctgacgcggggctaccgttgctgccgaacctattacatccggaccgctggctgctgtggctcgggctgctgttcgtcgccagcgtctacttcttcccgaccggaatcgtcggccgattgcgcggggcaccgaaggtcgccgactag

SEQ ID NO: 581 - protein, 355 aa, Rhodopseudomonas palustris
MMILSGDPPRSRVLSLLLITIVVVLAITPFVFPGAKPLNVAAKICIFAALVASYDLLLGYTGTVSFAHTMFYGIGSYAVAIALYGMGPSWAAVGAGVLIGLPLAALLALVIGLFSLRVEAIFFAMITLAVASAFLVLASQLSWLTGGEDGRSFSLPELLRPGTVFVKDFFGVRINGRILTYYIILVGCAGMILALLRVVNSPFGRVLQAVRENRFRAEALGYRTVFHLTYANVLAALVAAAAGVLNAMWLRYAGPDTSLSFSIMLDILLMVVIGGMGTIYGAIIGATIFILAQNYLQALMGAASGAAADAGLPLLPNLLHPDRWLLWLGLLFVASVYFFPTGIVGRLRGAPKVAD

SEQ ID NO: 582 - DNA, 939 bp, Rhodopseudomonas palustris
  CDS (1)..(939)
atggattgccgggtcaagcccggcaatgacgaagtgggaatcaagatgaactcgcacctcctgatccagcttctcgtcaacggcctcgtggtcggcacgctatacggcgtggtcgcgatgagtttcgtgctgatctacaaggcgacgcaggtcgtcaacttcgcccaaggcgagctgctgctgatcggtgcctgggtgtgctggacgctgctggcgaaatatcagctgccgttctgggtcggcatgccgatcacgctggtgttcatgttcatcttcggcatcgcggttcagatcatcgtgctgcggccgatgatcggcgagccgatcatctcggtgatcatggtgacgatcgcgctgtcgaccgtgttccaggcggcgctgaagtggatcttcggcgtcaatccgcagccgttcccccagatcttcaccacccgatcgatctcgatcggcggcctgcagatccagaccgtctatgtgatgagcctggtcgtctcggtcgcgatgatgatcggcatggcgtggttcttcagggtgtcgaaatacggcctcgcgatgcgcgccaccgcgttcaaccagcaggtggcgcagtcgctcggcatctcggtgaagagcgtattcgcgatggcctgggcgatctcggccaccgtttcggcggtcgccggcgtcgtcgtcgccgtggtcaacggcgtgtcgtcggggctgtcggcctacggcatcaaggtgtttccggccgcgatcctcggcggcctcgactcgatcggcggcgcggtgctcggcggcatcatcatcggccttttggagaacatcgcccagtacgtcgacagcgaatatctgcactggggcaatctctacgaaatagcgccgttctacgtgctgatcatcatcctgatgatcaagccctacggcctgttcggcaccaaggacatcgagcggatctag

SEQ ID NO: 583 - protein, 312 aa, Rhodopseudomonas palustris
MDCRVKPGNDEVGIKMNSHLLIQLLVNGLVVGTLYGVVAMSFVLIYKATQVVNFAQGELLLIGAWVCWTLLAKYQLPFWVGMPITLVFMFIFGIAVQIIVLRPMIGEPIISVIMVTIALSTVFQAALKWIFGVNPQPFPQIFTTRSISIGGLQIQTVYVMSLVVSVAMMIGMAWFFRVSKYGLAMRATAFNQQVAQSLGISVKSVFAMAWAISATVSAVAGVVVAVVNGVSSGLSAYGIKVFPAAILGGLDSIGGAVLGGIIIGLLENIAQYVDSEYLHWGNLYEIAPFYVLIIILMIKPYGLFGTKDIERI

SEQ ID NO: 584 - DNA, 948 bp, Rhodopseudomonas palustris
  CDS (1)..(948)
atgctcgagctgatcgtcatttccaccctcaatggcgttctgtacggaatgctgctgttcttgatggcgagcgggctcaccgtcatcttcagcatgctcggcgtgctgaacttcgctcatgccagcttctatatgctcggcgccttcttcggctatcagatcagccgctggacaggattctggccggcgctgctgatcgcgccgctgctcgccggcgcgatcggcgccgcggtcgaacggttcggcctgcgccgcgtccaccgcaacggccatgtcgccgaactgctgttcaccttcgggctcgccttcgcgatcgaagaagtggtgtcgatcatctggggcaaggttccggtcgattaccgcaccccggccctgctcgacttcccggcattcacgatcttctccaccaactaccccgcctacaagatgttcatgctggcagtgtcggtggtgatcttcgtcggcctcctggtggtgctgaagaagacccggatcggcctgatcgttcaggcggcgctgacccacccacacatggtcgcgcatctcggccacaacgtcgaacggatcttcatgctggtgttcggcgtcggcactgcgctggccgccgttgccggcgtgatcgcgggcccgtcgctggtgacgcagtccaacatggcttcgctgctcgggccgatcctgttcgtcgtcgtcgtggtcggcggcctcggctcgttgcccggcgcattcatcgcctcgctgctgatcgggctgctgcagaccttcgcggtgtctatcaacgcttcgcccgcaacgctgttcggtccgctcggtcccgatctcgccgcctcctggctcaacgacatctggaacgtgaccatcgctcagatcgcaccgatcatgccgtatctgctgctcgtgctcatcctgatcttccggccgatggggctgttgggaacccgcgaaacatga

SEQ ID NO: 585 - protein, 315 aa, Rhodopseudomonas palustris
MLELIVISTLNGVLYGMLLFLMASGLTVIFSMLGVLNFAHASFYMLGAFFGYQISRWTGFWPALLIAPLLAGAIGAAVERFGLRRVHRNGHVAELLFTFGLAFAIEEVVSIIWGKVPVDYRTPALLDFPAFTIFSTNYPAYKMFMLAVSVVIFVGLLVVLKKTRIGLIVQAALTHPHMVAHLGHNVERIFMLVFGVGTALAAVAGVIAGPSLVTQSNMASLLGPILFVVVVVGGLGSLPGAFIASLLIGLLQTFAVSINASPATLFGPLGPDLAASWLNDIWNVTIAQIAPIMPYLLLVLILIFRPMGLLGTRET

SEQ ID NO: 586 - DNA, 948 bp, Rhodopseudomonas palustris
  CDS (1)..(948)
atgatgccgaacctgttcggacgccgatccgtcatcctgatcgcgctcgctgtggtgatggcggtgctgccgctgctgtttccatcgagctattacttccgcgtcgcctcgctggtctgggtctcggcactggcggcgatcggtctcaacattctgatgggtaaggccggccaggtcagcctcggccatgccggcttcttcggcatcggcgcttatgctgtggcgatcgggccggcgcatttgggcctcaacgcgctgcttgcagtgctggttggcgccctgctctccgccctgctggcatttctggtcggccggccgatcctgcggctgaaggggcattatctcgccatcgccacgctcgggctcggcgtgctggtggcgatggtcatcaccaccgaaagcggctggaccggaggccctgacggcatgccggtgccgaagctgtcgttgttcggctggcgcatttccggatcgaacacctggtattggatcacggccgggctgctgctgatcggcacctggttcgcactcaacctcgacgacacgccgaccgggcgcgccttccgcgccctgcacgacagcgagatcgccgcgcgcaccgcaggcgtgcatgtcgagcgcttcaagctacaggccttcgtcattgcggcggtgtacgcctcgattgccggctcggcgctggcgatgatgaatggcttcgtcaatccggatcaggccggcttcctgcattcggtcgagctggtgacgatggtggtgctcggcggcctcggctccatcgtcggcagtatcgttggcgccgcggtgctggtggtgctgccgcaactgctgacggtatttcaggactacgagcatttcctgctcggtctgatcatcatcgtgtcgatgatcttcatgcgtgacggcatggtgccgatgctggcgaagctgaccatgagggcgcggcgatga

SEQ ID NO: 587 - protein, 315 aa, Rhodopseudomonas palustris
MMPNLFGRRSVILIALAVVMAVLPLLFPSSYYFRVASLVWVSALAAIGLNILMGKAGQVSLGHAGFFGIGAYAVAIGPAHLGLNALLAVLVGALLSALLAFLVGRPILRLKGHYLAIATLGLGVLVAMVITTESGWTGGPDGMPVPKLSLFGWRISGSNTWYWITAGLLLIGTWFALNLDDTPTGRAFRALHDSEIAARTAGVHVERFKLQAFVIAAVYASIAGSALAMMNGFVNPDQAGFLHSVELVTMVVLGGLGSIVGSIVGAAVLVVLPQLLTVFQDYEHFLLGLIIIVSMIFMRDGMVPMLAKLTMRARR

SEQ ID NO: 588 - DNA, 873 bp, Rhodopseudomonas palustris
  CDS (1)..(873)
atgtccgaactgctgcaatttctgatctcggggctgacggtcggagcggtgtatgcgctggtcgcactcggcttcacgctggtctatcacgcctccgacgtcgtcaatttcgcccagggcgaattcgtcatgctcggcggcatggtcaccgtgtttgcgtatgcggccggcttgccgctgccgctggcggccttgctggcggtgatcgtcgcggtggtcgtcggcctgttactgtattggctggcgattgcgccggcccgcggcgcctcggcggtatcgctgatcatcatcaccatcggcgcctcgatcctgctgcgcggtgcggcgcagatcgtgttcgacaagcagttccacaagctgccggccttctccggcgatgcgccgatccacctgctcggcgcggtgatccagccgcagagcctgtgggtgctcggcggcgcggcgctcgtggtgctgacgctttactacgtgatggagcgaacgctgatcggcaaagccgtggtcgcgaccgccgccaaccggctcgcggcgcggctggtcggcgtcaacgtcgccaccgtgatggcgctggcgttcggcggctcggccgcgatcggcgccatcgccggcattctgatcaccccgatcacgctgaccagctacgacgtcggcacgctgctggcgctgaagggctttgcggcagcgatgctcggcggcatgggcaatccgctcggtgccgtgatcggcggcctgttgctgggcctgttggagtcgttcggcgccggctacgtgtcgtcgacctacaaggacgccatcgccttcatcgtcatcctcgccgtgctgttcgtcgcgccgcaggggctggtcggccgtcgcactgtcgagcgggtctga

SEQ ID NO: 589 - protein, 290 aa, Rhodopseudomonas palustris
MSELLQFLISGLTVGAVYALVALGFTLVYHASDVVNFAQGEFVMLGGMVTVFAYAAGLPLPLAALLAVIVAVVVGLLLYWLAIAPARGASAVSLIIITIGASILLRGAAQIVFDKQFHKLPAFSGDAPIHLLGAVIQPQSLWVLGGAALVVLTLYYVMERTLIGKAVVATAANRLAARLVGVNVATVMALAFGGSAAIGAIAGILITPITLTSYDVGTLLALKGFAAAMLGGMGNPLGAVIGGLLLGLLESFGAGYVSSTYKDAIAFIVILAVLFVAPQGLVGRRTVERV

SEQ ID NO: 590 - DNA, 918 bp, Rhodopseudomonas palustris
  CDS (1)..(918)
atggactatttcgcccagcagctcatcaacggtctcgtgctcggctcgatctatggcctgatcgcgatcggctacacgatggtgtacggcatcgtcggcatgatcaatttcgcccatggcgacatcttcatgatcggcggcttcatcgcgctgatcagcttcctgatcctggtgtcgttcggcctcaccttcgtcccgctcatcctcctggtggtgctgctggtgtcgatggcgatcaccgcgctgtacggctggacggtcgagcgcatagcgtaccgcccgttgcggcattcgttccgcctcgccccgatgctgtcggcgatcggcatgtcgttcgtgctgatgaactacgcccaggtgtcgcagggcgcccgcgtcaagccggtgccgccgatcatcaccggcggctatacgctgcacgagagcgccgacggcttcaacgtgcagctctccaacgtccagatccttgtggtggtcaccaccgtggtgctgctcggcatcttcacctggctggtggccaagacccggctcggccgcgacatgcgcgcctgcgagcaggatcagaccatggctgcgctgctcggcgtcgacgtcgaccgcaccatctcgatgaccttcgtgatcggcgccgcgctcgcctcggtcgcgggcatgatgtacctgctgtattacgggctgatcgacttcttcatgggcttcatcgccggcatcaaggctttcaccgcggctgtgctcggcggcatcggctcgctgcccggcgcgatgctcggcggcctgttgatcggcctgatcgagaccttctggtcggcctatttctcggtcgagtacaaggacgttgcggcgttctcgatcctgatcatcgtgctgatcttcatgccgaccggcctgctgggccggccggaagtcgaaaaagtctga

SEQ ID NO: 591 - protein, 305 aa, Rhodopseudomonas palustris
MDYFAQQLINGLVLGSIYGLIAIGYTMVYGIVGMINFAHGDIFMIGGFIALISFLILVSFGLTFVPLILLVVLLVSMAITALYGWTVERIAYRPLRHSFRLAPMLSAIGMSFVLMNYAQVSQGARVKPVPPIITGGYTLHESADGFNVQLSNVQILVVVTTVVLLGIFTWLVAKTRLGRDMRACEQDQTMAALLGVDVDRTISMTFVIGAALASVAGMMYLLYYGLIDFFMGFIAGIKAFTAAVLGGIGSLPGAMLGGLLIGLIETFWSAYFSVEYKDVAAFSILIIVLIFMPTGLLGRPEVEKV

SEQ ID NO: 592 - DNA, 1614 bp, Rhodopseudomonas palustris
  CDS (1)..(1614)
atgcctctcatccatctgacgcgcattctatttgccgcagtcgcgatcgcgttcgtcactctggggagcctgccggcggtggccggtccctatgaggacgccatcgcgcaattcgcccaagattccttcaccgacagcgaggacgcgatcggcaagctggtcgccagcggcaatccgcgcgccgcggtgatcatcaccgcgctgcaggacggcaagctctacgccgacccggacagcaaagcggccttcatcaagaccgacgacggcaagatcgccaatgcggcgaccggcgaggcggtcggtgcgctgccggccaaggccagcgcggttcggctcaacaacaagctgcgccgcgtcgtcgccggcgcgatggccggcctgacgctgctgtcgccggatctcgacaagcggctgcaggctgcgcaatcggtattcaagtcgcacgacgagaccatgctgccgaccgtcgaggcggcgctgaaggcggaaaagaacgccgccgccaagcgcgccttcaccgaagcgcgggcgtcgatcctgctgttcaagcagggcgcctccgatgccgacaagctggacgcgatcgccaccatcaaggcgcgcggcgatcaggaggcgatggcgctgctcaccggcgcgccgtcgaaccagagcgccgccgtcgccagcggcatcgccggcgccaaggcggcgatcgagcgcaatctggcgatctggtcgatggtgcagaacgcctggtatggactgtcgctcggctcggttctactgcttgccgcgatcggcctcgccatcaccttcggtgtgatgggcgtcatcaacatggcgcatggcgagatggtgatgctcggggcctacaccaccttcgtggtgcaggaggcgatccgcacgcgttatccggcgctgttcgactattctttgttgattgcggtcccgctcgcgttcctcgttgccggcgcagtcggcgttctgatcgaacgcaccgtgatccgcttcctctacggccgtccgctggagaccttgctcgccacctggggactgtcgctgatcctgcagcaggcggtgcgcacgctgttcggccccaccaatcgcgaggtcggcaatccgagctggatgagcggtgcgttcgaactcggcgagatgaccatcacttacaaccggctgtggatcctgtgcttcacgctggcggtgttcgccctgctgctggcgatgctgcgctacacctcgctcggcctggagatgcgcgcggtgacgcagaaccgccgtatggccgcgtcgatgggcattgccacgtcgcgggtcgacgcgctgacgttcggactcggctccggcatcgccggcattgccggtgtggcgctgtcgcagatcgacaacgtctcgccgaacctcggccagagctacatcatcgacagcttcatggtggtggtgttcggcggcgtcggaaacctgtggggcacgctggtcggcgccttctcgctcggcatcgccaacaagttcctggagccggtcgccggcgccgtgctaggcaagatcgccatcctggtgctgatcatcctgttcatccaaaagcgcccccgcggcctgttcgcgctcaagggccgggcggtggaggcatga

SEQ ID NO: 593 - protein, 537 aa, Rhodopseudomonas palustris
MPLIHLTRILFAAVAIAFVTLGSLPAVAGPYEDAIAQFAQDSFTDSEDAIGKLVASGNPRAAVIITALQDGKLYADPDSKAAFIKTDDGKIANAATGEAVGALPAKASAVRLNNKLRRVVAGAMAGLTLLSPDLDKRLQAAQSVFKSHDETMLPTVEAALKAEKNAAAKRAFTEARASILLFKQGASDADKLDAIATIKARGDQEAMALLTGAPSNQSAAVASGIAGAKAAIERNLAIWSMVQNAWYGLSLGSVLLLAAIGLAITFGVMGVINMAHGEMVMLGAYTTFVVQEAIRTRYPALFDYSLLIAVPLAFLVAGAVGVLIERTVIRFLYGRPLETLLATWGLSLILQQAVRTLFGPTNREVGNPSWMSGAFELGEMTITYNRLWILCFTLAVFALLLAMLRYTSLGLEMRAVTQNRRMAASMGIATSRVDALTFGLGSGIAGIAGVALSQIDNVSPNLGQSYIIDSFMVVVFGGVGNLWGTLVGAFSLGIANKFLEPVAGAVLGKIAILVLIILFIQKRPRGLFALKGRAVEA

SEQ ID NO: 594 - DNA, 1008 bp, Rhodopseudomonas palustris
  CDS (1)..(1008)
atggacgcgatcgttctgcagatcctgaacggcctcgacaaaggaggggcctatgcgctgatcgcgctcgggctgaccttggccttcggcacgctcggcgtggtgaacttcgcccacggcgcgctgttcatgctcggcgcgttctgcgccgtggtgttcaacaagtttctgacgctggagatcgtcaagatcgatccgacgcggacgacgccctggggctcgccgctggaggtcaagacgccgtatgtccaggcgatgctgggcgattggggtaaggtgctgatcgattactcggtgccggtctcgattctgctcgccattccggtgatgctgctgatcggcatcctgatcgagcgcggcctgatccggttcttctacaagcgcccacacgccgaccagatcctggtcactttcggccttgccatcgtgctgcaggagatcgtcaagcacttcttcggcgccaatccgatcgcgcagtcggcgccagcgttgttctccggctcgctgcagatcaccgaggcgatcgtctatccatactggcgcatcgtctatctatgcttctcgctggtggtgatcggctcggtctttgccttcctccagctcaccaccttcggcatggtggtgcgcgccggcatgcaggaccgggaaaccgtcggcctgctcggcatcaatatcgagcggcgcttcaccatcgtgttcggccttgcggcgatcgtcgcgggtctggccggtgtgatgtacacgccgatcgtgccacccgactatcacatgggcatggacttcctggtgctgtcgttcgtcgtcgtcgtggtgggcggcatggggtcgctgccgggcgcggtgctggccggcttcctgctcggcatcctgcagtcgttcgcctcgatgaacgagatcaaaggcctgctgccgggcatcgatcagatcatcatctatctggtcgccgtggtggtgttgttggtgcgtccgcgcggtttgctgggacgcaagggcgtgatggagagctga

SEQ ID NO: 595 - protein, 335 aa, Rhodopseudomonas palustris
MDAIVLQILNGLDKGGAYALIALGLTLAFGTLGVVNFAHGALFMLGAFCAVVFNKFLTLEIVKIDPTRTTPWGSPLEVKTPYVQAMLGDWGKVLIDYSVPVSILLAIPVMLLIGILIERGLIRFFYKRPHADQILVTFGLAIVLQEIVKHFFGANPIAQSAPALFSGSLQITEAIVYPYWRIVYLCFSLVVIGSVFAFLQLTTFGMVVRAGMQDRETVGLLGINIERRFTIVFGLAAIVAGLAGVMYTPIVPPDYHMGMDFLVLSFVVVVVGGMGSLPGAVLAGFLLGILQSFASMNEIKGLLPGIDQIIIYLVAVVVLLVRPRGLLGRKGVMES

SEQ ID NO: 596 - DNA, 873 bp, Rhodopseudomonas palustris
  CDS (1)..(873)
atggacatcgccaccttcgccttcgcggcgctgtatcaattcgccgacgcctttgccttcctggtgctgtcggcctgcgggctcgccgtcatcttcggcatgatgggcgtcatcaatctcgcccacggcgagttcatcatgtgtggcgcctacgtcaccgccaccgcggctcacgccggactgccgctgccgctcgccattctgaccggtgcgctggtttcggcgatggtcggcatgctggtcgagttcgtggtggtgcggcatctctatgaacgcccgctcgacaccatcgtcgccacctggggcctcagcctgatcgcgacgcaaggcacactgatcgtgatcggctcgaccatggctggtgtcggtacgccgttcggcagttttcaggtcggcgcctattcctattcgatctaccggatcgtgctgtttctggccgcgctcggcgtgctcggcgggctgtacgcggtgttcaactggacatccttcggcgtcaaagcacgcgccaccatccaggtgccgcacatggcggatgcgctcggcgtcgacacccgctggatctacagcctgaccttcgcctgcggcgccgggctcgccggactggccggcgggctgtacgcgccgaccatgacattggtgccgacgatgggcgcgaccttcctgatggaggcgttcgtcacggtggtgatcggcggcgcggacgtgttcctcggcacggcgccggctgctgcagtcctggctgtggtgaagtcggcgatgacgtcatggcagggccagttgttcggtcaaatcggcctgttggtcgcggtgatcatcgtggttcgggtgctgccgaaaggcatctccggcttcctgctgcgtgaacggacctga

SEQ ID NO: 597 - protein, 290 aa, Rhodopseudomonas palustris
MDIATFAFAALYQFADAFAFLVLSACGLAVIFGMMGVINLAHGEFIMCGAYVTATAAHAGLPLPLAILTGALVSAMVGMLVEFVVVRHLYERPLDTIVATWGLSLIATQGTLIVIGSTMAGVGTPFGSFQVGAYSYSIYRIVLFLAALGVLGGLYAVFNWTSFGVKARATIQVPHMADALGVDTRWIYSLTFACGAGLAGLAGGLYAPTMTLVPTMGATFLMEAFVTVVIGGADVFLGTAPAAAVLAVVKSAMTSWQGQLFGQIGLLVAVIIVVRVLPKGISGFLLRERT

SEQ ID NO: 598 - DNA, 876 bp, Rhodopseudomonas palustris
  CDS (1)..(876)
atggatatcaatgtccccgctctgttggcgcagcttctggtcggcctgatcaacggttcgttctacgcgctgctcagcctcggcctcgccgtgatcttcggcatgctcaacatcatcaacttcgcgcacggcgcgttgtacatgatgggcgcgttctgcgcctatttcctgctcaatctgctcggcctgaactattggtgggcgctgattctgtcgccgatcatcgtcggcctgttcggcatggtgatggagcgcacgctgctacaatggctgtcggggctcgatcacctctacggcctgctgctcaccttcggcgtggcgctgatcatccagggcgtgttccagaactatttcggttcatccggcctgccttatgcgatccccgaacagctccgcggcgcgatcaatctcggcttcatgtatctgccggtgtatcgcggctgggtggtggtgttctcgctggtggtgtgcctgctcacttggttcctgatcgagcgtacccggctcggcgcctatttgcgcgccgccaccgagaacccgacgctggtgcgcgcgttcggcatcaacgtgccgcggatgatcacgctgacctacggcctcggcgtgggcctggccgcgcttgccggcgtgctgtctgcgccgatcaaccaagtccgcccgctgatgggcgccgacctgatcatcgtggtgttcgccgtggtggtgatcggcggcatgggctcgatcatgggctcgatcatcaccggcttcgctctcggcgtcgtcgagggcttgaccaagtatttctaccccgaggcctccaacaccgtggtgttcgtgctgatggtgctggtgctgcttgtgaaaccctcgggcctgaccggacgggcaacctga

SEQ ID NO: 599 - protein, 291 aa, Rhodopseudomonas palustris
MDINVPALLAQLLVGLINGSFYALLSLGLAVIFGMLNIINFAHGALYMMGAFCAYFLLNLLGLNYWWALILSPIIVGLFGMVMERTLLQWLSGLDHLYGLLLTFGVALIIQGVFQNYFGSSGLPYAIPEQLRGAINLGFMYLPVYRGWVVVFSLVVCLLTWFLIERTRLGAYLRAATENPTLVRAFGINVPRMITLTYGLGVGLAALAGVLSAPINQVRPLMGADLIIVVFAVVVIGGMGSIMGSIITGFALGVVEGLTKYFYPEASNTVVFVLMVLVLLVKPSGLTGRAT

SEQ ID NO: 600 - DNA, 1041 bp, Rhodopseudomonas palustris
  CDS (1)..(1041)
atgaacaccacgattctgctgttccttgttcaggacggtatcaccaacggcgcgatctacgcactgctcgggctggcgctggtgctggtctttgcggtcacccgggtgatcctgatcccccagggtgaattcatcacattcggcgctctcacctacgcgacgctgtcggccggcggcgtgccgggcaccgcgcagcttgcgctgatgatgggcctggtggcgttcggcttcgagctgttcagcgcccgtaaatcgctgcatgtcgccaaagtgatgcgcgcggcgctgatctacatcgccttcccggcgatcgtgctggcgctggcgacctggctgccggcgcataaaccgggcgtcgccgtcaacatcgcgctgtcgctgctgatcgtcgccgcgatcgggctgtttctgtatcgcatcgccttccagccgctggcgcacacttcggtgctggtgctgctgatcgcctcggtcggctgccacttggcgctgcagggcttcggcctggtcttcttcggcgccgaaggcctgcgcggcccaccgctgtcggacgtggcgctcagcgtcggaccgttgctattcaccggccagagcctcgcggtgtacggcatcacgctggcgctgatggcggcgctgtggctgttcttcggctacacccgctacggcaaggcgctgcgcgccaccgcggtcaaccggctcggcgcgcgactggtcggcatccgtacctcgctctccggccagatcgcgttcctgctcgcctcggtaatcggcgcgatctccggcatcctgatcgtaccgatcaccacactctattacgataccggcttcctgatcggcctcaagggcttcgtcgccgcgatcatcggcggactggtcagctatccgctcaccgccatcgccgcgatcgtggtcggtatcgtcgagtcgttctcctcgttctatgcctcgaactacaaggaggtcatcgtcttcacgctgatcctgccggtgctggtgctgcgctcgctcgccacccccgcggtcgaagaagagaaggactaa

SEQ ID NO: 601 - protein, 346 aa, Rhodopseudomonas palustris
MNTTILLFLVQDGITNGAIYALLGLALVLVFAVTRVILIPQGEFITFGALTYATLSAGGVPGTAQLALMMGLVAFGFELFSARKSLHVAKVMRAALIYIAFPAIVLALATWLPAHKPGVAVNIALSLLIVAAIGLFLYRIAFQPLAHTSVLVLLIASVGCHLALQGFGLVFFGAEGLRGPPLSDVALSVGPLLFTGQSLAVYGITLALMAALWLFFGYTRYGKALRATAVNRLGARLVGIRTSLSGQIAFLLASVIGAISGILIVPITTLYYDTGFLIGLKGFVAAIIGGLVSYPLTAIAAIVVGIVESFSSFYASNYKEVIVFTLILPVLVLRSLATPAVEEEKD

SEQ ID NO: 602 - DNA, 1773 bp, Rhodopseudomonas palustris
  CDS (1)..(1773)
atgccgcgttggttgccaattctcctgttcgccgccgtgatgacggcgctgccgctgattccgggcattccgccgttctggatcgtgctgctcgacaatatcggcctcgccgcgctggtggcgatgggcctggtgctgctcaccggcgtcggcgggctcacctcgttcggtcaggccgcgttctgcggcttcggcgcctacaccaccgcctacatcaccaccgtctacggcatctcgccgtggctggcgctgccggcctcgctggtggtcgccggcatcgccgcagtgctgctcgggctgatgacggtccggctctcaggccattatctgccgctcggcaccatcgcctggggcatcgcgctttactacctgttcagcaagctcgacttcctcggccgcaacgacggcatctcgcgggtgccgccgctgtcgatcggcccgatcgacatgtacgatccgcatacgatctatttcgtgatctgggcgatggtactgatcagcgcggtgctgacgatgaacctgctcgacagccgcaccggccgcgcgatccgcgcgctacgccgtggccatgtcgctgccgaagcattcggggtgcagaccgcgcgcgccaagcttctggtgttcatctacgccgcggtgctcgccggcctttccggctggctgtacgcgcatttccagcgcaacgtgaacccgacgccgttcgggccccaggccggcatcgagtatctgttcatcgccgtggtcggcggcgccggctatgtctggggcggcgtgcttggcgccgcgatcgtcatcatcctgaaggaagtgctgcagggctatctgccgctgctgttcggcggccagggccagctcgagatcatcgtgttcggcatcctcttggtggtgctgctgcagctcgcgcccggcggcgtctggccctggctcgccaatctggtgccgctgaaattccggcgtgccgtcaccggcaatgccgacggcctgcccgcgcgcgagcgcgtcggcggctccaccaccgccccgctgctgaaggtcgaacgcgcgcgaaagcagttcggcggcgtggttgcggtcaacgacgtgtcgttcgaggtcaacgccgcggagatcgtcgcgctgatcggcccgaacggcgccggcaaatcgaccaccttcaacctgatcaccggcatcctcaccactaccggcgggcggatcgaagtgcacggcaagccggtcgacaacacgccgccgcaggaggtggtgaagctcggcatcgcccgcaccttccagcacgtcaagctggtgccggacatgaccgtcctggagaatgtcgcgatcggagcgcacttgcgcggccgctccggggcgatcaccagtatgctgcggttcgatcgcggcgacgaggccaagctgctcgccgaagccgcacgccagatcgagcgcgtcgggctcggcgccgagatcgatcagctcgcggggtcgctctcgctcggccagcagcgcatcgtcgaaattgcgcgggcgctgtgtgccgatcccgaactgcttctgctcgacgagccagccgccggcctgcgccacatggaaaagcagcggctcgctgcgctgctgcggcagctcaaggacagcggcatgtcggttctactggtcgaacacgacatgggctttgtgatggacctcgccgaccgcatcgtcgtgctcgacttcggcaccaggatcgccgaaggcacccccgacgctatcaagaccaatccggacgtgatcaaggcctatctcggagcgctggcatga

SEQ ID NO: 603 - protein, 590 aa, Rhodopseudomonas palustris
MPRWLPILLFAAVMTALPLIPGIPPFWIVLLDNIGLAALVAMGLVLLTGVGGLTSFGQAAFCGFGAYTTAYITTVYGISPWLALPASLVVAGIAAVLLGLMTVRLSGHYLPLGTIAWGIALYYLFSKLDFLGRNDGISRVPPLSIGPIDMYDPHTIYFVIWAMVLISAVLTMNLLDSRTGRAIRALRRGHVAAEAFGVQTARAKLLVFIYAAVLAGLSGWLYAHFQRNVNPTPFGPQAGIEYLFIAVVGGAGYVWGGVLGAAIVIILKEVLQGYLPLLFGGQGQLEIIVFGILLVVLLQLAPGGVWPWLANLVPLKFRRAVTGNADGLPARERVGGSTTAPLLKVERARKQFGGVVAVNDVSFEVNAAEIVALIGPNGAGKSTTFNLITGILTTTGGRIEVHGKPVDNTPPQEVVKLGIARTFQHVKLVPDMTVLENVAIGAHLRGRSGAITSMLRFDRGDEAKLLAEAARQIERVGLGAEIDQLAGSLSLGQQRIVEIARALCADPELLLLDEPAAGLRHMEKQRLAALLRQLKDSGMSVLLVEHDMGFVMDLADRIVVLDFGTRIAEGTPDAIKTNPDVIKAYLGALA

SEQ ID NO: 604 - DNA, 834 bp, Rhodopseudomonas palustris
  CDS (1)..(834)
atgggacttctgtacggcttggtcgcggtcggcctggctctgatctttggcctgatggatgtcaccaacttcgcccacggcgaattcctgatgttggcgatgtacatcaccttcttcctgttcgcgttcttcgcgatcgatccgatcctcgccgctccgctcgtcggggcggcgatgttcgtgttcggcgcggtgatttacctattggtcgtccgatttgcgatgagagccagagccaatatcggcatggtgcagatcttcacgaccttcggcctcgcaatcctgatgcgcggcttggcgcagtacttcttcacccccgactatcgcagcatcaacgtctcctggctgggcggcaagacgctggagatcggcggcgtgttcctgcccgtgccgcaactggttggcgcgctggtgtcgatcgccgcgttcggcgcgttgtacttcttcatgaagaagaccgatttcggccgtgcgctcgaagcgacccgcgaggacgcaggcgcggtggccctggtcggcatcgacaagaacaaggtgttcgcgctgggttggggccttggctcggcattgatcggtctggcgggggccgtgatggcgatcttcttctatatctatcccgatgtcggcgcctcgttcgcgctgatcgcctacgtcaccgtggcgctcggcggctttggcagcgtgttcggcgccttcgccggtggcatcatcgtcggcctggtcgaggcgaccaccgcgatgatcctgccgccgtcgctgaagtcgatcggcatctacgccgtttatctgctggttgtgttcattcggccgcgtggcctgttcggatcgatctga

SEQ ID NO: 605 - protein, 277 aa, Rhodopseudomonas palustris
MGLLYGLVAVGLALIFGLMDVTNFAHGEFLMLAMYITFFLFAFFAIDPILAAPLVGAAMFVFGAVIYLLVVRFAMRARANIGMVQIFTTFGLAILMRGLAQYFFTPDYRSINVSWLGGKTLEIGGVFLPVPQLVGALVSIAAFGALYFFMKKTDFGRALEATREDAGAVALVGIDKNKVFALGWGLGSALIGLAGAVMAIFFYIYPDVGASFALIAYVTVALGGFGSVFGAFAGGIIVGLVEATTAMILPPSLKSIGIYAVYLLVVFIRPRGLFGSI

SEQ ID NO: 606 - DNA, 876 bp, Rhodopseudomonas palustris
  CDS (1)..(876)
atgctcgccctgcaaatcctgatcgacggtttcgccatcagcgcgttgtatgcgctgggcgcgaccgggttcacgttgatcttcggcgtctccggcgtgctcaacctgtcacacggcgccatcatggtcgccgccgcggtcgcggcctgggcggcatcgagcacgttcggcatcggcagctacgccggcgcgctgatcggcatcgccaccgccctggtgatcgcattgctgacctattttgcggtggtgcagccgatccagcggtcacggcggatcgccaatgaggagaaggagatcttcgtcctcaccggcaccctgctctggggcatcatgatccaggaggcgatcgcttactttttcaccaacaacgccaagacggtgttgccgatcgtcaccggcgtggtcgaaattctcggcgtccgcaccccgcgcaacgagatcttcaccgcgctggtgtgctgcctggtgatcgcgctgctgtggctgctggtcaaccgcaccaagatcggcaaggcggtgctggcggcctcgatgaacccgcgcggcgtcaccctgctggggctcgaactcaccaacatctacgtcgtcgtctggatcatctacggcgtgctcgccggtatcgccggggtgctgctcggcatgttcctgggcgtgtcgtcctacagcgtcggtccgctgaccgcgagcgcattctcgatcgtggtgctcggcgggctcggcagcgtctccggctcgctgatcgccgccttcgtggtcggctatctggagaccttcaccgcttacatgatctcgccggcctatcgatcgatcccggcgctgctgctgttggtcacggtgatgtatctgcggcctcagggcctgctcgggaggcgctga

SEQ ID NO: 607 - protein, 291 aa, Rhodopseudomonas palustris
MLALQILIDGFAISALYALGATGFTLIFGVSGVLNLSHGAIMVAAAVAAWAASSTFGIGSYAGALIGIATALVIALLTYFAVVQPIQRSRRIANEEKEIFVLTGTLLWGIMIQEAIAYFFTNNAKTVLPIVTGVVEILGVRTPRNEIFTALVCCLVIALLWLLVNRTKIGKAVLAASMNPRGVTLLGLELTNIYVVVWIIYGVLAGIAGVLLGMFLGVSSYSVGPLTASAFSIVVLGGLGSVSGSLIAAFVVGYLETFTAYMISPAYRSIPALLLLVTVMYLRPQGLLGRR

SEQ ID NO: 608 - DNA, 876 bp, Rhodopseudomonas palustris
  CDS (1)..(876)
atgccgagcttgcccgttctgatttcgcaggcctttaacggcttggcactcggctcactgctggcacttgtcagcagcgggttgacgatcattctcggcacgctcggcgtgctcaattttgcccacggcgcgctgttcgccgtgggcgcctacaccgtcttcgtgatgctgcagtacacctcgtccttcgtgctggcggtcgtcgtcggctgcggcttcatgctggtgctcggcttcgtgctcgagcgcgtcattatccgttacttttacgaccgaccgcacgaagaccagatcctcgtgacgtacggcatcggcatcgtgctcgtcgagtgcatccgagccggattcggaggcaacgcccagcgggtgcccgtgccgtcctgggggcagggcgccacgcagctcggcttcctgatctatccaacctatcggttgcaactgatcgcgatcatcgccgggttgctgctcgccctctatctggtgttgtaccgtacctcaatgggcctggtggtgcgcgccgggatcgaaaatccgggtatggtcggaattctaggcatcaatgtccgccgtgccttccttctggtgttcgcgatcggcatcgtcgccgtcggcctcgcaggaatgctgtatgcccccgtggtcgcggtttcgccggacatgggtgcaaacttcatggcccaatccttcgtggttatcgtgctcggtggtctcggctcgttccccggcgccatcgtcggcggcctgatcgcgggcgagatcatcagtctcacgagtgcgttcaactcgtcgtattcggaagtcatgctctacgcacttatggcgctgttgctcgtgatgcgtccgcaggggctgttcggtacggaaggccgggcatga

SEQ ID NO: 609 - protein, 291 aa, Rhodopseudomonas palustris
MPSLPVLISQAFNGLALGSLLALVSSGLTIILGTLGVLNFAHGALFAVGAYTVFVMLQYTSSFVLAVVVGCGFMLVLGFVLERVIIRYFYDRPHEDQILVTYGIGIVLVECIRAGFGGNAQRVPVPSWGQGATQLGFLIYPTYRLQLIAIIAGLLLALYLVLYRTSMGLVVRAGIENPGMVGILGINVRRAFLLVFAIGIVAVGLAGMLYAPVVAVSPDMGANFMAQSFVVIVLGGLGSFPGAIVGGLIAGEIISLTSAFNSSYSEVMLYALMALLLVMRPQGLFGTEGRA

SEQ ID NO: 610 - DNA, 864 bp, Rhodopseudomonas palustris
  CDS (1)..(864)
atgagcgaattctggcaggccttggcgcaaggcgtcctgatcggaagcacctacgggctgctcgcgctgggcatgggcctggtgtacggcgtgtccggcatcgtcaacttcgcccatggcgatttcatctcactggcgatgttcatggcgctggcgctgttctcggcattcgcgctggatccttacgtctcggcgctgattaccatcccggtgatggcgctcatcggcggactggtctatcgctatctgttacggccgatggccgggcaccagttcttgatgatcgtacagctcaccctcggtctcagcctcgtgctgcagaacggcatcctgatggttttcggcggccagccggcgcgcacgccgtcgatcgtggaatcgaagttgatcattctcggcgacgtcgtgctgcggttgccgcatctgatcgcgtttgcggtcgcgttcgcgatggcgatcgggctgtacgtgatgctgcgctcgaccgatttcggccgctcgatccgcgcggtgcatcagaacgcgcgcgccgcagcgttgatgggggtcgacgtgggccgtgttcaggtcgtcacctttgcgatcggtgtcgccatcctcgccgttgctgcggcgctgctgctgccgggcacgccgatcactccgacccagggcctgcagtacactgttatcacgctgctggtcgtggtgctcggcggcatgaccaatttcgtcagcatcatgctcagcggcctggtgatcggtatctccgaggcgttcggccagatctatgtatcggatacgctcggccgtctcgtgccgtacgcgatcttcgtgctgatcatgctgttccggccgcagggcctgacctggaggacgtcatga

SEQ ID NO: 611 - protein, 287 aa, Rhodopseudomonas palustris
MSEFWQALAQGVLIGSTYGLLALGMGLVYGVSGIVNFAHGDFISLAMFMALALFSAFALDPYVSALITIPVMALIGGLVYRYLLRPMAGHQFLMIVQLTLGLSLVLQNGILMVFGGQPARTPSIVESKLIILGDVVLRLPHLIAFAVAFAMAIGLYVMLRSTDFGRSIRAVHQNARAAALMGVDVGRVQVVTFAIGVAILAVAAALLLPGTPITPTQGLQYTVITLLVVVLGGMTNFVSIMLSGLVIGISEAFGQIYVSDTLGRLVPYAIFVLIMLFRPQGLTWRTS

SEQ ID NO: 612 - DNA, 927 bp, Rhodopseudomonas palustris
  CDS (1)..(927)
atgttcggcgaatattcgattggtgatctcggggcgatcttcgcgatgcagggcttcgcggggctcattctgttttccgtctacgtgctgatggcgcttggcctggcgatcatcttcggccagatgggcgtcatcaacatggcccacggcgagttcatgatcctcggcgcctacgtcacctggatgacgtcgaacttcttccaatcctatctgccgtcgctgttcgccggctacttcttcatcgcgatgatcctggcgttcatcgcctccggggcactcggcatgctggtggagtgggggctgatccgccacctctataagcgtccgctcgacaccctgctggcgacctgggggttgtcgctgatccttcagcaggcctaccggtcgatcttcggtgcgcgcgaggtcggcgtcgagttgccgcagtggatgctcggctccaagcaggtcaccgacaccatcgagattccgatcaacggcatgttcgtgatggcgctcaccgtgctgatcaccgcggccgtgtcctacgtcctgttctggtcgcgctggggccgccaggtccgcgccgtggtacagaatcgggtgatggccggcgccgtcggcatcaacactgaaaaggtcgaccgctacaccttcggcctcggctgcggcatcgcaggcatcgcaggctcggccttcaccatgatcggttcgaccggtccgacctccggccagctctatatcgtcgacaccttcctggtcgtggtgttcggcggcgccgccagcctgttcggcaccattgcatcggccttcagcatctcacaggcgcagtcgaccatggagttcttcatgtccggctcgatggccaaggtgctgacgctgctcgccatcgtcgcgatcctgatggtgcggccgcaaggtctgttcgctctcaaggtccgtaagtaa

SEQ ID NO: 613 - protein, 308 aa, Rhodopseudomonas palustris
MFGEYSIGDLGAIFAMQGFAGLILFSVYVLMALGLAIIFGQMGVINMAHGEFMILGAYVTWMTSNFFQSYLPSLFAGYFFIAMILAFIASGALGMLVEWGLIRHLYKRPLDTLLATWGLSLILQQAYRSIFGAREVGVELPQWMLGSKQVTDTIEIPINGMFVMALTVLITAAVSYVLFWSRWGRQVRAVVQNRVMAGAVGINTEKVDRYTFGLGCGIAGIAGSAFTMIGSTGPTSGQLYIVDTFLVVVFGGAASLFGTIASAFSISQAQSTMEFFMSGSMAKVLTLLAIVAILMVRPQGLFALKVRK

SEQ ID NO: 614 - DNA, 873 bp, Rhodopseudomonas palustris
  CDS (1)..(873)
atgctcgatttcgtccagcaggtgatcggcgggattgccctcggctgcgtctacggcttgatcgccctcggcttcgtgctgatctacaaggcgaccgaagtcgtcaattttgcgcagggcgaaatcatgatgctcggcgcgtttctgtcgttcaccttcatcgccacgctcgggctgaactactggttcggcttcctgctttgtgtggtcagcatggcggtgctcggcgccgcgatggaacggctggtggtgcggccgatcctcgggtacccgcagttctcgatcgtgatggcgacgatcgggctcggtctcgtcatccgctcgttggttggcatcatctggggcaccgacgatttgcggatcgagacgccgttcaccggcggtgtgatccagcttggcggcttggtgctgtcgcaggacagcctgtcgatcattgttgccaccgcgctgctgtgcgccgtgctgtacgctttcttccgcttcaccaagatcggtatcgccatgcaggcgacgtcccagaacatgctggcggcctactacatgggcattccggtgaagcggatgttctcgctgatctggagcctgagtgcgatcgtagcctgctgcgccggcgtgctgctggcgccgatcaccttcatccacgccaatctgggtttcctcggcatcaaggcgttcccggccgccgtgctcggcggcttcggcagcatccccggcgcgctcgccggcggcatcaccatcggcatcgtggaatcgctgtcgggcttctatctgccggaagggttcaaggacgtcgcggcctacatcgtgctgctcgcggtgctgctgtggcggccgcagggcctgttcggcagcaacgcgctgaagaaggtctga

SEQ ID NO: 615 - protein, 290 aa, Rhodopseudomonas palustris
MLDFVQQVIGGIALGCVYGLIALGFVLIYKATEVVNFAQGEIMMLGAFLSFTFIATLGLNYWFGFLLCVVSMAVLGAAMERLVVRPILGYPQFSIVMATIGLGLVIRSLVGIIWGTDDLRIETPFTGGVIQLGGLVLSQDSLSIIVATALLCAVLYAFFRFTKIGIAMQATSQNMLAAYYMGIPVKRMFSLIWSLSAIVACCAGVLLAPITFIHANLGFLGIKAFPAAVLGGFGSIPGALAGGITIGIVESLSGFYLPEGFKDVAAYIVLLAVLLWRPQGLFGSNALKKV

SEQ ID NO: 616 - DNA, 867 bp, Rhodopseudomonas palustris
  CDS (1)..(867)
atgcggacgattctcggaatcctgccggacgcgctggcctacggcatggtgctgttcacgatctcgatcggcctgtcgatcatgatgggcttgatgcgcgtggtcaatctcgcacacggcgcattcgcgatgatcggcggttatctcgcctcgttcgcgctggtttcgctcggcgtttcctatccgatagcgatcctgatcgcggtgatcggcgcggtcatcatctcggtcccgttcgagttcctgctgtatcggcggatctatcgccgctccgacgaactgacccagatcctgctgacgatcggcatcaccttcttcatcgtcggcatcgccaactacatcttcgggccgacttcgaagccgatcccgctgccggagatgctgaaggggccgttcgatctcggcttccgcatgatcccggcgcaccggctgttcgtgatcggctgtggcgtggtcaccgcggtggcgctgtggctactgatagagaagaccgagttcggcgtgcggctgcgcgcggcggtcgacaatggcgacatggccgaggcgctgggcattcgcacccaaattgtctattcggtcaccttcgcgctggcggtggggctcgcggcgttcggcggcgtggtcggcgccgagctgctgccggtcgagccgttctacgcgctgcgctacatggtgacgttcctggtcgtggtctcggtcggcggcgccggctcggtcaccggtgcgatggcggcgtcgctgttgctcggccttgccgacactaccggcaaatatctggcgccggagtttggcgagttcttcttctatgtcgcggtgatcgtcatcgtttacgtattcccgcacggcctgttcggaaaggcgcactaa

SEQ ID NO: 617 - protein, 288 aa, Rhodopseudomonas palustris
MRTILGILPDALAYGMVLFTISIGLSIMMGLMRVVNLAHGAFAMIGGYLASFALVSLGVSYPIAILIAVIGAVIISVPFEFLLYRRIYRRSDELTQILLTIGITFFIVGIANYIFGPTSKPIPLPEMLKGPFDLGFRMIPAHRLFVIGCGVVTAVALWLLIEKTEFGVRLRAAVDNGDMAEALGIRTQIVYSVTFALAVGLAAFGGVVGAELLPVEPFYALRYMVTFLVVVSVGGAGSVTGAMAASLLLGLADTTGKYLAPEFGEFFFYVAVIVIVYVFPHGLFGKAH

SEQ ID NO: 618 - DNA, 870 bp, Unknown
  uncultured bacterium 582
  CDS (1)..(870)
atgctaatgctttttgagcaaatcttaaatggtttgctagtggggtcttattatacccttctcgcgctcggcctctcgattatttttagtcttgggggcgtcgtcaatcttgcccatggcgcgttttatgcggttggggcgtatctgacagtgttgtttactgatattcttgggtttggccttgcctttttgatcacccccgctgtggttggtctcatcggcattgcaattgaggcgctgtttttgcgcagactttacaacaaagatccaattctgaccttgctgtttacttttggtttagcgatgtccggtgaacaagctttgcgcttaatttttggggcctccggcattccattctcgattccagaatttttgtcgggtcagctacacgtcggtgattttctatattcatactaccgcctgtcaattctggcggtcaccagcttatcaattgcagggttgtggatattattcaataagacctcctttggtctgatcgttcgagccggcgttgcagatgctgaaatggtccgcgcgatgggaatatctgtcaaacccattttgtctatggtttttgcaattggcgtgggtttggctgcagtagcaggttccatgtcggcaagcttaacgggtgttcaacctgccatgggaaatgacatcgtgacagccgcttttgtcatctgtgtcttaggcggattaggcagtttttggggcgtcgtttttgcgggtctcttagtgggtattttgaagggcgttacagctttgtattttccacctgcggctgagggatcgatctatgcattgatggttctggttctgatctttcgtccacgcgggatgtttggtgttaaatttgaaaggctcgaatag

SEQ ID NO: 619 - protein, 289 aa, Unknown
  uncultured bacterium 582
MLMLFEQILNGLLVGSYYTLLALGLSIIFSLGGVVNLAHGAFYAVGAYLTVLFTDILGFGLAFLITPAVVGLIGIAIEALFLRRLYNKDPILTLLFTFGLAMSGEQALRLIFGASGIPFSIPEFLSGQLHVGDFLYSYYRLSILAVTSLSIAGLWILFNKTSFGLIVRAGVADAEMVRAMGISVKPILSMVFAIGVGLAAVAGSMSASLTGVQPAMGNDIVTAAFVICVLGGLGSFWGVVFAGLLVGILKGVTALYFPPAAEGSIYALMVLVLIFRPRGMFGVKFERLE

SEQ ID NO: 620 - DNA, 1254 bp, symbiont bacterium of Paederus fuscipes
  CDS (1)..(1254)
atgagccagtctctgaaacgcgcgctgttcagcgccctgctggtgttgttggtgtcttatccgatccttggtctgaggttgcgtaccgttggcatcaagctacaagttatcggtgccgatgcacagaccctctggagtattgccgtagccactatggctatgttcgtctggcaactgtttcgtgaccgtgtcctactcaagtttgggagtgggatcaagtacaaggtggacaaccgtggtctgaagatctttctcagcctgccgtcgacccagcgctggatcgttctggctttggtgttagtggcattcatttggccgttcttcgcctcacgtggcgcagtggatatcgccactctgatcttgatctacgtgatgctgagtattggcttgaatatcgtggtcggtctggccggtctgctcgacctgggttatgtcggcttctacgcagtgggtgcatatacctacgcgctgcttgccgagtacgccggtttcggtttctggagcgctctgcccatcgctggaataatggcggcgctgttcggttttctgcttggtttcccggtgctgcgcctgcgcggcgactacttggcgatcgtgacgttgggcttcggcgaaatcatccgcatcttgctgcgcaacctgaccgatatcaccggcggccccaacggcattggctcgatccccaagccgactctgttcggtcttagcttcgaacgccgcgcaccagggggcttacagacttttcatgagtttttcgatatcgactacaacagtaactacaaggtgatcctgctctatatgatcgctttgctgctggtactgctagccctgttcgtgatcaaccggctgatacgcatgccgatcggccgcgcctgggaagcgctgcgtgaagatgaagtagcctgccgtgctctgggccttaacccgactcttgtcaagctctctgcattcactatcggtgccggtttcgctggtttcgccggttgcttcttcgcagctcgccagggcctagttacgccggagtccttcaccttcattgagtccgtgatgatcctcgcgatcgttgtactcggtggtatgggctcacagcttggcgtaatccttggcgcggtagtgatggtactgctcttagagcggcgagagttcgccgaataccggatgctgatcttcggtctggccatgatcgtgatgatgatctggcgcccgcaaggactactgccgatgcaacgcccgcacttggagctgaaaccatga

SEQ ID NO: 621 - protein, 417 aa, symbiont bacterium of Paederus fuscipes
MSQSLKRALFSALLVLLVSYPILGLRLRTVGIKLQVIGADAQTLWSIAVATMAMFVWQLFRDRVLLKFGSGIKYKVDNRGLKIFLSLPSTQRWIVLALVLVAFIWPFFASRGAVDIATLILIYVMLSIGLNIVVGLAGLLDLGYVGFYAVGAYTYALLAEYAGFGFWSALPIAGIMAALFGFLLGFPVLRLRGDYLAIVTLGFGEIIRILLRNLTDITGGPNGIGSIPKPTLFGLSFERRAPGGLQTFHEFFDIDYNSNYKVILLYMIALLLVLLALFVINRLIRMPIGRAWEALREDEVACRALGLNPTLVKLSAFTIGAGFAGFAGCFFAARQGLVTPESFTFIESVMILAIVVLGGMGSQLGVILGAVVMVLLLERREFAEYRMLIFGLAMIVMMIWRPQGLLPMQRPHLELKP

SEQ ID NO: 622 - DNA, 879 bp, Alcaligenes eutrophus
  CDS (1)..(879)
atgttccagagcatcctggtccaggccctgagcggcgtcagcagcggcatggtgctgttcctggtcgcttcgggcatgacgctgatcttcggcacgctgcgcgtcgccaatttcgcgcacggctccttctacatgatcgcggcctacctgagcttcacgctcacgcgctgggtcggccacggaacctggggcttcgtcgtctcgctggtcgtggcgccgctcatcgtcgcactgctcgggctggtggtcgagcgcttcctgctgcgccgcatcgccacgcgcgcccaccagtaccagctgatcctgacctatgcgctgacgctgatcctggcggatgccgtgaagatgatctggggccgcgacaacttcacggtgccgcgccccggcgcgctcgacggcgccttcgacatcttcggcacgcccttcccgagctactacgcgctcttgatcgtggtcggcgccgtcatcgccgtcgcgctgcacctgctgctgacgcgcacgcgcttcggcaaggtgctgcgcgcctcggtcgccgacggccagatggtgggcgcgctcggcatcgacgtgccgcgcctgtacaccggcgtgttcgcgctcggcgcctggctggccggcctgggcggtgccctggcggcgccggtgggctcgatctcgctgggcatcgacagctcgatcatcatcgaatgcttcgcggtcgtgatcatcggcggcgtcggcagcgtcggcggcgccctgctcggcgcgctgatcatcggcgtgaccaagtcggtcggcatcctgttcgcgcccaagctggcgatcgccttcatcttcattgcgctgtgcgcggtgctggtgctgcggccgcagggcctgctgggccgcagcacggcctga

SEQ ID NO: 623 - protein, 292 aa, Alcaligenes eutrophus
MFQSILVQALSGVSSGMVLFLVASGMTLIFGTLRVANFAHGSFYMIAAYLSFTLTRWVGHGTWGFVVSLVVAPLIVALLGLVVERFLLRRIATRAHQYQLILTYALTLILADAVKMIWGRDNFTVPRPGALDGAFDIFGTPFPSYYALLIVVGAVIAVALHLLLTRTRFGKVLRASVADGQMVGALGIDVPRLYTGVFALGAWLAGLGGALAAPVGSISLGIDSSIIIECFAVVIIGGVGSVGGALLGALIIGVTKSVGILFAPKLAIAFIFIALCAVLVLRPQGLLGRSTA

SEQ ID NO: 624 - DNA, 882 bp, Rhizobium sp
  CDS (1)..(882)
atggaactgttcttccaacttgtcgtcgatggccttgcatccggagccatctacgcgtccctggcgctggccttggtcctgatcttccgtgcgacgcgcatcgtcaatttcgggcaaggcgaaatggccaccttctcggcttattgtgcctggcagctctatgaatggggcatgccgatgatgctttccttcctcgtcgtcggcgtcttcgcgttcgtgctcgggatcggcattttccgcttcgtcatcaggccggtttctaaggccccggtcgaggccgtcgtcgtcgtgacgctcgggctcttcgtcgtcttccaggcgctatccctgtggctctggggttccgaccagcgtgcttttccctcgctgttcccgaacatcggctgggatttccttggcgtgcgcatgacggcaagtgcggccggcatgatcgcccttctgctctgtctcgccgtggccacgggggcggtctttcgcttcacacggcttggcctcgccatgcgagcctccgcctttgatggcgagaagagcctgcttgttgggatccccgtcgaacggatgctgatgctcggctggggctttgccgcggtgattggcttcgtcgcggcgcttctggtcgggccgcggctgttcctgagcccgacgatgatgatgccgatcctgctctacgccctggcgtcggcgacccttggcggctgggacagcccgctcggggcgatgatcggcggtctgattgtcggtgtggcggaaagcctcggcgcgacctttctccccttcatcggtgcggatctgcgcgtggtgatcccgatactcgtcactctcgtcgtcctgctcgttcggccggtcggtctcttcggtactcgcacggtggtcaagctatga

SEQ ID NO: 625 - protein, 293 aa, Rhizobium sp
MELFFQLVVDGLASGAIYASLALALVLIFRATRIVNFGQGEMATFSAYCAWQLYEWGMPMMLSFLVVGVFAFVLGIGIFRFVIRPVSKAPVEAVVVVTLGLFVVFQALSLWLWGSDQRAFPSLFPNIGWDFLGVRMTASAAGMIALLLCLAVATGAVFRFTRLGLAMRASAFDGEKSLLVGIPVERMLMLGWGFAAVIGFVAALLVGPRLFLSPTMMMPILLYALASATLGGWDSPLGAMIGGLIVGVAESLGATFLPFIGADLRVVIPILVTLVVLLVRPVGLFGTRTVVKL

SEQ ID NO: 626 - DNA, 921 bp, Desulfovibrio vulgaris
  CDS (1)..(921)
atggaaacgttcatccagaacatattcaacgcgttgcaatgggggagtttctacgccctcatcgcgctcggttatacgctggtgtacggcgtacttctgctcatcaacttcgcccacggcgacatcttcatggtgggcgcgtacatctcgttcttcgttgcctccatcctgctcgggcagatagggggattcttcgaactttcggggcccatggcccttgccctcaccgtgccgctgaccatggtcctgaccgcaggcgtcggggtcaccctcgaacgggtggcctacagacccctgcgccgcaagggggcccaccgcctgtatgtggtcatcaccgcactcatgtgcggcatcatgctcgagaacggcaacctcgccctgctgggcgccagccgcaaggctctgccggagatgatcgacaaggtggtgtacaccatcggcaccgtttcggtgaccaacctgaagctcatggtcatcgtcaccgcctttctcgtcttcgcgcttctgcagttcatcgtcacgcgtacccgcatcggcatggccatgcgcgcggtggcgtgggacaagttcgcgctgccgctcatgggtatcccgctcgacagtatcatcgtcttcaccttcgtgctcggctccggttttgccggtcttgcggggctgctcttcgccatgtcgtaccccatcctcgatccctacatgggagccatggtggggtggaaggccttcatcgccgccgtcgtgggcggcataggcgatatccgcggggcgttcatcggaggcttcctgctggcgttcatcgagatcatggtggcggcggtcttcccctccacgttccgcgacctgttcgccttctcgattctgctcttcatcatgtggcagcggcccaccggactgttcggcgtggcgaagaccaccaagatctaa

SEQ ID NO: 627 - protein, 306 aa, Desulfovibrio vulgaris
METFIQNIFNALQWGSFYALIALGYTLVYGVLLLINFAHGDIFMVGAYISFFVASILLGQIGGFFELSGPMALALTVPLTMVLTAGVGVTLERVAYRPLRRKGAHRLYVVITALMCGIMLENGNLALLGASRKALPEMIDKVVYTIGTVSVTNLKLMVIVTAFLVFALLQFIVTRTRIGMAMRAVAWDKFALPLMGIPLDSIIVFTFVLGSGFAGLAGLLFAMSYPILDPYMGAMVGWKAFIAAVVGGIGDIRGAFIGGFLLAFIEIMVAAVFPSTFRDLFAFSILLFIMWQRPTGLFGVAKTTKI

SEQ ID NO: 628 - DNA, 906 bp, Desulfovibrio vulgaris
  CDS (1)..(906)
atggaagaattcctgcaacagttgaccaacggcctcgcggtggggggcatctacgccctcatcgccctcgggtacaccatggtgtacggcgtgctcaaactcatcaacttcgcgcatggcgacctgttcaccatcggagcctatctcgggttcacggtgttcgccgcgctggggctttcggggcatgtctccggggcggtggccgtattgctggtcacgaccatggtcatggggcttgtggcactcatcggctatctgcttgaacgtgtggcctaccggccattgcgctcgtcaagccgcctctctgccgtggtctctgcgcttggtgcctccatcttcttccagaacgccgtgatgctcatctacggtgccaagttccaagtctaccccaacgacatcaggcccaccatggccgtgagcttcttcggcatggacatccctctggtgcgcatcatgatgttcggtgcttctgtggcgctcatgctgcttctgcatttcttcatccaccgcacccgcacgggcactgccatccgcgccgtggccatcgaccagggcgcggccaagctcatgggcatcgacgtgaaccgggtcatcgcgctggtgttcatgatcggccctgcactgggtggcgccgcaggcgtcatggtaggcctctactatgggcagatagacttcaccatggggtgggtgtacggcctcaaggccttcaccgccgccatcctcggtggcatcggcaacatccccggtgccatggtgggcggtcttctgctgggcgtcatcgaggccctcggtgcggcatacatctccatcgcgtggaaagacgccatcgccttcctcgtcctcatcctcatcctgatcatcaggcccacgggccttctcggcgaaagggtggccgacaagatatga

SEQ ID NO: 629 - protein, 301 aa, Desulfovibrio vulgaris
MEEFLQQLTNGLAVGGIYALIALGYTMVYGVLKLINFAHGDLFTIGAYLGFTVFAALGLSGHVSGAVAVLLVTTMVMGLVALIGYLLERVAYRPLRSSSRLSAVVSALGASIFFQNAVMLIYGAKFQVYPNDIRPTMAVSFFGMDIPLVRIMMFGASVALMLLLHFFIHRTRTGTAIRAVAIDQGAAKLMGIDVNRVIALVFMIGPALGGAAGVMVGLYYGQIDFTMGWVYGLKAFTAAILGGIGNIPGAMVGGLLLGVIEALGAAYISIAWKDAIAFLVLILILIIRPTGLLGERVADKI

SEQ ID NO: 630 - DNA, 1224 bp, Desulfovibrio vulgaris
  CDS (1)..(1224)
atgcaaggcatcataaaatctcttcaggtcggcctctggttcatgttcctgacctttccgctgatggtcatacgggtcgacacgctgaacggtacggtggactggcggtggcagaacatggtcatgatggggcttggaaccttcgccctgtcgttcctgtggcgctatatgctcgcccgcaaggaagcggggggcgcatctgcccggcagggcaacgccgccgcgggcgggctgatggcccgcgtgcgcagtgacgcccgactccggaccccggcgctgcttgcggtgcttgtggtgttcgccgtgctgcccatgctggtctccacctatcagaccaacatcatgatttcggccctgctctacgtgatgctcggcctcgggctgaacatcgtcgtgggcctttccggtcagcttgtgctcggctacgtggccttctacgccgtgggcgcctacgcctacgccctgctcaacgcggacttcggtctcggcttctggacggtgctgcccatcgggggagctctggctgccgtcttcggcatcctgctcggttttccggtgctgcggctgaagggcgactatcttgccatcgtcacgctgggcttcggtgaaatcgtccgcctcgtgctggaaaactggggcagtgtcacgcgcggtcccagcggcatctccaagatcgcccgccccggtcttttcggcatggaactgtcggtgagcgaagccaccacctacatctattacctcatccttgcggcggtgattttcaccatcttcgccgtgggacgcctcaaggactcgcgcataggacgcgcctggcaggccctgcgcgaagacgaaatcgcctgcgaggccatgggcatcgacctcaccaccaccaagctcacggctttcgcgctgggagcgtgctgggccggcttcgccggggtcatcttcgcggccaagaccaccttcatcaaccccgccagcttcaccttcctcgaatcggcgatgattctcgccatggtggtgcttggcggcatggggtcgacactgggggtggtgctgggagcgctggtgctcatccttctgcccgaatacctgcgtgccttctcggagtaccgcatgctcatcttcggtgcggcgatggtgctcatgatggtgttcaggccgcaggggctggtgtcgtgccgctccagagagtatgatgtgaacgaccccgaagcgggtaagagcggggagaaggcgtaa

SEQ ID NO: 631 - protein, 407 aa, Desulfovibrio vulgaris
MQGIIKSLQVGLWFMFLTFPLMVIRVDTLNGTVDWRWQNMVMMGLGTFALSFLWRYMLARKEAGGASARQGNAAAGGLMARVRSDARLRTPALLAVLVVFAVLPMLVSTYQTNIMISALLYVMLGLGLNIVVGLSGQLVLGYVAFYAVGAYAYALLNADFGLGFWTVLPIGGALAAVFGILLGFPVLRLKGDYLAIVTLGFGEIVRLVLENWGSVTRGPSGISKIARPGLFGMELSVSEATTYIYYLILAAVIFTIFAVGRLKDSRIGRAWQALREDEIACEAMGIDLTTTKLTAFALGACWAGFAGVIFAAKTTFINPASFTFLESAMILAMVVLGGMGSTLGVVLGALVLILLPEYLRAFSEYRMLIFGAAMVLMMVFRPQGLVSCRSREYDVNDPEAGKSGEKA

SEQ ID NO: 632 - DNA, 909 bp, Desulfovibrio vulgaris
  CDS (1)..(909)
atggattggcagtatttctgtgaactcttgttcggtgggctcacgcgcggcagcatctatgcacttatcgcgctcggctacaccatggtgtacgggatcatcgagctcatcaacttcgcccatggcgaggtctacatgatcggcgcgttcacggcgctcatcgtggcgggtgtgctcggcatctatggctttcccgaggcgggcatcctcatcatcgccgccatcgtcgcggtcatctactgcgccgcctacgggttcacgctggagaaggtggcgtacaagcccctgcgtgacgcgccacgcctttctccgctgatctcggccatcggcatgtccatctttctccagaactatgtcatcctcgcgcagacctcggacttcgtgccgtttccgcgcctcgtgcccgacctcgccatccttgagcccatcgcccacatcaccgggacgagtgatgttctgatcatcgtcacgagcgccatcaccatggtgggcctcaccctgttcatcaagtacacccgcatgggcaaggccatgcgcgccacggcgcagaaccgcaagatggccatgctgctcggcatcgacgccgacagggtcatctccctcaccttcatcatcggttcctcgctggcggccatcggcggcgtgctcatcgcctcgcatatcggtcaggtgaacttcgccatcggcttcatcgcaggcatcaaggcgttcaccgccgctgtgcttggcggcatcggctccattcctggcgccatggcgggcgggcttgtgctcggcctttgcgagagtttcgcaaccggctacgtgtccagcgactatgaagacgccctcgccttcgcgctgctcgtgctcattctcatcttcagaccctccggtatcctgggcaagcccaagacccagaaggtctag

SEQ ID NO: 633 - protein, 302 aa, Desulfovibrio vulgaris
MDWQYFCELLFGGLTRGSIYALIALGYTMVYGIIELINFAHGEVYMIGAFTALIVAGVLGIYGFPEAGILIIAAIVAVIYCAAYGFTLEKVAYKPLRDAPRLSPLISAIGMSIFLQNYVILAQTSDFVPFPRLVPDLAILEPIAHITGTSDVLIIVTSAITMVGLTLFIKYTRMGKAMRATAQNRKMAMLLGIDADRVISLTFIIGSSLAAIGGVLIASHIGQVNFAIGFIAGIKAFTAAVLGGIGSIPGAMAGGLVLGLCESFATGYVSSDYEDALAFALLVLILIFRPSGILGKPKTQKV

SEQ ID NO: 634 - DNA, 969 bp, Thermus thermophilus
  CDS (1)..(969)
atgctagagcagatcctggtcctgctgccccaggtgctctttgacggcttcatcctgggcttcatctacgccatgatcgccctggggtacaccatggtctacggcgtcttggagctcatcaacttcgcccactccgagatcttcatgatcggggccgtggccggggtggaggtcttccgctacctcgcccccctgatccccaacggctacctcctcctcctggtggccgtggtggtgggggcggcggtggcgggcctcaccgccatcctggtggagcgcatggcctaccggcccctccgccgccggggcaccaccaaccgcctcgtgcccctggtgacggccatcggggtgagcttcttcctccaggacctggtgcggctcattgagggcctctggcacaacgagttcttcctgcgcatgcgcaccataccggacctcgagggctccttcaccctcttcgggggcgccatcttcatccagaccaagtcggtgatcgtcatcgtggtctccgtgctcatgctctgggggctcacctacctggtgaaccgcaccaagctggggatggccatccgggccgtggcccaggacctcaccacggcgagcctcatgggcatcaaccccgaccagatcatctcccgcaccttcctcatcggcggcgccttgggcggggtggccggggtcctcttcgccctcatctacaccaccatcaacccctacgtgggcttcctccccggcatcaaggccttcaccgcggcggtcctgggcgggatcggcaacatccccggggccatgctcgggggcctcgtcctggggcagctggagaacttcttcggcacctacctgcccatcctcaccgccggcaacttcgggacggagtacaaagacgtggtggccttcctcatcctcatcttcatcctcctcttccggccccaaggcctcctgggccagatggttaaggagaaggtatga

SEQ ID NO: 635 - protein, 322 aa, Thermus thermophilus
MLEQILVLLPQVLFDGFILGFIYAMIALGYTMVYGVLELINFAHSEIFMIGAVAGVEVFRYLAPLIPNGYLLLLVAVVVGAAVAGLTAILVERMAYRPLRRRGTTNRLVPLVTAIGVSFFLQDLVRLIEGLWHNEFFLRMRTIPDLEGSFTLFGGAIFIQTKSVIVIVVSVLMLWGLTYLVNRTKLGMAIRAVAQDLTTASLMGINPDQIISRTFLIGGALGGVAGVLFALIYTTINPYVGFLPGIKAFTAAVLGGIGNIPGAMLGGLVLGQLENFFGTYLPILTAGNFGTEYKDVVAFLILIFILLFRPQGLLGQMVKEKV

SEQ ID NO: 636 - DNA, 978 bp, Thermus thermophilus
  CDS (1)..(978)
atggacgccaccatcctcggcctcctccttctggacggcgtgcagaacggggtcatctacgggcttctcgccctggccatggtcctcgtcttcgccgtgacccgggtgatcctggtgcccatcggggagctcatgatgttcgcccccctctccttcgtctggctccaagaggggaagctccccggcaccctgtggctcgccctcgccttgggggtcctttgggccctgttggagcggggaaggggccgggggctccccctcctgggagggatggggcttctcctcctcttcctcctcgcccagggaagcccggccctcgcctatttggcggccctcctcctcgtggtctacctgggggtggccacctaccgggtcttcttccagcccatgcgggaggccacggtcctcgccctcctcatcatggccgtggggcttcacgtggcctaccagggcctgggcctcgtcttcttcggcccggagcagttccgccccgacccccttctccagggggaggtggtggtgggcctcacctggcagggcgtcttggtcctggccttcgccctcttgagcgccgccgccctctacctcttcttccgccgttccctcttcgggaaggcccttctggcggcggcggagaaccggcttggggcgaggctttgcgggatccgcccggaggaggcggggatggtggccttcgccatcgcgggcctcatggcggccctttcggggcttcttttggcgcccctcatcaacgccgcctacttcatgggctttatgctggggctcaaggccttcgtggcggccatcctgggtgggctcgtgagctacccggtggcctttttgggcgcggtcctggtggggctttttgaaagcttcaccagcttctacgcgagcgcctacaaggaagctttggtgttcctcctcctggtgccggccctcttctaccagagcctccgggcgaagggggtggaggagtga

SEQ ID NO: 637 - protein, 325 aa, Thermus thermophilus
MDATILGLLLLDGVQNGVIYGLLALAMVLVFAVTRVILVPIGELMMFAPLSFVWLQEGKLPGTLWLALALGVLWALLERGRGRGLPLLGGMGLLLLFLLAQGSPALAYLAALLLVVYLGVATYRVFFQPMREATVLALLIMAVGLHVAYQGLGLVFFGPEQFRPDPLLQGEVVVGLTWQGVLVLAFALLSAAALYLFFRRSLFGKALLAAAENRLGARLCGIRPEEAGMVAFAIAGLMAALSGLLLAPLINAAYFMGFMLGLKAFVAAILGGLVSYPVAFLGAVLVGLFESFTSFYASAYKEALVFLLLVPALFYQSLRAKGVEE

SEQ ID NO: 638 - DNA, 858 bp, Thermus thermophilus
  CDS (1)..(858)
atggagcttttcgcccagacccttctcaacggcgtgctgatggccggggtctacgccctggtggccacgggcctcgccctctccctgggggtggtgggcatcgtcaacttcgcccacggggagttcctcatgctcggggcctacctctcctacctcctcttcgccttccgcggcgtggaccccctcctttccctgggcctcgccttcctggccgccttcctggtgggcgcgctgacctaccacggcctgatccgcccggtgctcaaagctccggagctcaaccagatgctcctcaccttcggcctctccgtgttcctgcagaacctggccctcctcctcttcggggcggacacccgggtggtggccccgccctaccaggcggccaccctcgctttgggccccttcttcctgggggcggtgcccctcggggccttcctcctctccctggccctgcttctccttctccaggccttcctcacccgaagccgcctggggcttgcggtgcgggccgtggcccaaaaccgggtggcccccgggcttttagggatagaggcggaggcggtctacctcctcgccttcggcctctcggccgccctggccggggtcgccggggtgatgctctcggtgatgctctacgccagccccacggtgggcttcctcttcaccctaaagtccttcgccatcgtggccttggcggggctcgggaacctcaagggggtgatcccggcggctttggtcctggccctggccgaggccctggtgagcacctacgtccccgggggcggggggctggtggaggccgtcttcttcctggtgctcttcctggccctggtgggccgggcctggagggcggcatga

SEQ ID NO: 639 - protein, 285 aa, Thermus thermophilus
MELFAQTLLNGVLMAGVYALVATGLALSLGVVGIVNFAHGEFLMLGAYLSYLLFAFRGVDPLLSLGLAFLAAFLVGALTYHGLIRPVLKAPELNQMLLTFGLSVFLQNLALLLFGADTRVVAPPYQAATLALGPFFLGAVPLGAFLLSLALLLLLQAFLTRSRLGLAVRAVAQNRVAPGLLGIEAEAVYLLAFGLSAALAGVAGVMLSVMLYASPTVGFLFTLKSFAIVALAGLGNLKGVIPAALVLALAEALVSTYVPGGGGLVEAVFFLVLFLALVGRAWRAA

SEQ ID NO: 640 - DNA, 876 bp, Thermus thermophilus
  CDS (1)..(876)
atggcggacctccttccctacctcatcggcggcttggccaacggggccctctacagcctcctcgccttgggcttcgtcctcgtctaccgggcgaccagcgtggtgaacttcgccatcggggagttcctcctcgtgggggcctacctcacctacaccttcgccctcctccttcccctccccttggccctcctcgccgccctgcccctcgccttcctcttcggggtcctggtggaacggggcttcgtgcggccccttctcggccggaacgtggtggcggtgatcatggcgaccatcggcctcgccgccgccctggatgggggggtgcagctcctctggggcccggacctcaagtacctgccgggaagcctccccgacctcggctttgaagcgggaggggtctacgtctcctcccgggcggtctggaacctcctcctggccctgcccttggggctcggcctcctctggctcctccggaaaagccgctacggcgtcctggtccgggccatctccgagcgggaggtggccgccttggccctgggcatccccacggcccggatcctggccggggtctggggggtctccgccctcctcgccaccttggcgggggccctcctcgccgcggcgagcggggtggggcacaacctcgtcttcttcgggctcaaggtcttccccgtggccatcctgggggggcttgacgccgtgggcggggctctggcggcggggtttttgctcggggtcctcgaggccctctcccagcgctacctggaggcctacctccccggcttcaccgaggccctgcccttcgtggtggtcctcctcgtcctcctcgtgaggccctacggcctcttcggggagcggcagattgagagggtgtag

SEQ ID NO: 641 - protein, 291 aa, Thermus thermophilus
MADLLPYLIGGLANGALYSLLALGFVLVYRATSVVNFAIGEFLLVGAYLTYTFALLLPLPLALLAALPLAFLFGVLVERGFVRPLLGRNVVAVIMATIGLAAALDGGVQLLWGPDLKYLPGSLPDLGFEAGGVYVSSRAVWNLLLALPLGLGLLWLLRKSRYGVLVRAISEREVAALALGIPTARILAGVWGVSALLATLAGALLAAASGVGHNLVFFGLKVFPVAILGGLDAVGGALAAGFLLGVLEALSQRYLEAYLPGFTEALPFVVVLLVLLVRPYGLFGERQIERV

SEQ ID NO: 642 - DNA, 1068 bp, Thermus thermophilus
  CDS (1)..(1068)
atgttcgccctctccaaacgcctcaccgacgcctttagcctccgcttcgcccgggcggtgcgggagacctaccgggaggacgaggcctacgccagcacccccttgggccgcctcgccctctacgcctttctcctcctgctcctcctcctccccctcctcctcggcccctaccccatgtacgtggccaccctggtggccatcggggccctctccgccctgggcctccacctcctggtggggggcgcggggcagatctccttaggccacgccgccttcatgggggtgggggcctacgcggcaagccacctcacgggccccctcgcccccttggggatcctcctcgggggcgggatcgccgcctttttggggcttctcctcggcctcccctccctcaggatcaagggggtgtacctggccatcgccaccctggccttccagttcctggcggactacgtcttcaagacctgggaggcggtcacgggggggatccggggccggacccttcctccccccgaggtcttgggcctcgtcctggacaccccggagaagctctggtacctggtcctcctcttcgccctccccctcttcttctacggcaagcgcctcctcatgacccgcgccgggcgggccttccgggcggtgcgggacaacgacctctccgcccgggtggccggggtggacctcacccggaccaagctcctcgccttcgccctctccgccttctacgccggggtggcgggggggcttctcgccgggctctacaaggcggtgaccccggagtactttcccctctccgtgagcatccagtacctggccatggtcatcgtgggcggggcggggacggtcttgggagcggtcttgggggccttcttcgtcctcctcatccccgaggtgctcaatagcttcgtgggggccctgggcccggagtacgccgcccagctcgccgcctggcgcaacgtggtcttcggcggcctcatcctcctcttcctggtcctcgagcccctgggcctggtggggctttgggggcgggtgcgggactacttccgcacctggcccctgccctactag

SEQ ID NO: 643 - protein, 355 aa, Thermus thermophilus
MFALSKRLTDAFSLRFARAVRETYREDEAYASTPLGRLALYAFLLLLLLLPLLLGPYPMYVATLVAIGALSALGLHLLVGGAGQISLGHAAFMGVGAYAASHLTGPLAPLGILLGGGIAAFLGLLLGLPSLRIKGVYLAIATLAFQFLADYVFKTWEAVTGGIRGRTLPPPEVLGLVLDTPEKLWYLVLLFALPLFFYGKRLLMTRAGRAFRAVRDNDLSARVAGVDLTRTKLLAFALSAFYAGVAGGLLAGLYKAVTPEYFPLSVSIQYLAMVIVGGAGTVLGAVLGAFFVLLIPEVLNSFVGALGPEYAAQLAAWRNVVFGGLILLFLVLEPLGLVGLWGRVRDYFRTWPLPY

SEQ ID NO: 644 - DNA, 894 bp, Thermus thermophilus
  CDS (1)..(894)
atgagcttcttcctccagctcctcttctcgggggtggtcctggggctcgtctacgccctcgccgccttgggcttcgtcctcatctacaaggcgagccgggtggtgaacttcgcccaggggcagttcatcgccatcggggcctttttggcctactgggccatggtcgccttgggggcgccctttcttttggccgcggccttggccctggccttaaccgccctcttgggctttggggtggagcgggtcttcctgaagcgcatggtggggcagcccatcatctccgtcatcatggccaccatcggcctcgcctccctccttgacggcctgatccaccttacccccttcggggcgggcaacttcagctaccccgccttcctgccctcgggcggcgtcgccctcctgggggcgcaggtctcctacccccagctcctcgccctgggcttcaccctggccttcctcgccctcttcacctggtttttccagcgctccaccctggggatcgccatgcggagcgtggccgacgaccagatggcggccatgagcctcggggtctcggtggagaaggtcttcgccctggcctgggcggcggcggggctcacggcggcggcggccgggatcgtggtgggcaccatcgccggcctcaacctggacgggctggtgcacatcggccttagggtcttccccgtggtgatcctgggggggctggactccatccccggggcggtggtggcggggatcctcatcggcgtcttggaaaacctggcggcgggctacctggacccctttgtccccggcggggggacccgggacgtcttccccttcctggtcctccttttggttctctggttcaagccccatggcctcttcggcacggaggagattgagcgcgtatga

SEQ ID NO: 645 - protein, 297 aa, Thermus thermophilus
MSFFLQLLFSGVVLGLVYALAALGFVLIYKASRVVNFAQGQFIAIGAFLAYWAMVALGAPFLLAAALALALTALLGFGVERVFLKRMVGQPIISVIMATIGLASLLDGLIHLTPFGAGNFSYPAFLPSGGVALLGAQVSYPQLLALGFTLAFLALFTWFFQRSTLGIAMRSVADDQMAAMSLGVSVEKVFALAWAAAGLTAAAAGIVVGTIAGLNLDGLVHIGLRVFPVVILGGLDSIPGAVVAGILIGVLENLAAGYLDPFVPGGGTRDVFPFLVLLLVLWFKPHGLFGTEEIERV

SEQ ID NO: 646 - DNA, 861 bp, Bacillus cereus
  CDS (1)..(861)
atggatgtgttaatcaatttatttgtaaatgggatttcaacagggatgctcatttttttattagcatcaggtctttcacttattttcggtttaatgagtgttctaaacttcgcacatggtggtttatttgcatggggagcatttacaggtgtttggctatttaatatgacagggagttatgtgttagctttaattggagcaatagctatgggaatgttccttggatttattttagaaagattccttattagaccggtatacggaaatcatgttcgacagcttcttgttacacttggaggaatgcttgtacttagtgaatgtattaaagtattttggggaccaaatccaattggggcaaagttaccgttatggctacaaggaagttttacgttcggaggcgttatattaattaaatatcgtctattcgttatcataattggggttatcatatacattgccttattattattgctcaaaaaaacaaagataggtcttatgatacgcgcaggtgtaatggataaagagatggttcaagcgctcggtattaacgtaaaagctatattttctttcgtctttttattaggagcagggatggctgccttaggtggcttcttattagcaccatactcaggcgttattttcgctgagatgggtatgcagtatgcgattttagctttcatagtagtaatcattggagggctaggaagcgtacaaggttcagccatcgcttctttaattgtcggattagctggtgcttttacagcgtattttataccggatttatcacttgcaatcaatatgttaatgttactatttttcttaatagtgaagccaaatggacttgttggtgaaaaggggtga

SEQ ID NO: 647 - protein, 286 aa, Bacillus cereus
MDVLINLFVNGISTGMLIFLLASGLSLIFGLMSVLNFAHGGLFAWGAFTGVWLFNMTGSYVLALIGAIAMGMFLGFILERFLIRPVYGNHVRQLLVTLGGMLVLSECIKVFWGPNPIGAKLPLWLQGSFTFGGVILIKYRLFVIIIGVIIYIALLLLLKKTKIGLMIRAGVMDKEMVQALGINVKAIFSFVFLLGAGMAALGGFLLAPYSGVIFAEMGMQYAILAFIVVIIGGLGSVQGSAIASLIVGLAGAFTAYFIPDLSLAINMLMLLFFLIVKPNGLVGEKG

SEQ ID NO: 648 - DNA, 900 bp, Treponema denticola
  CDS (1)..(900)
atgttattgcagcaattaattaatggtctggtcataggaagtacatatgcattggttacaataggttttaatatggtgtacggtgtgttggagctgactaattttgcccatagttctttttatatgctggctgcgtatataggtcaattcattttgttaaaattctttatgactgtatcggtccctattgctctgattataacatttttaacttccataattataacagcctttttgggtgctcttatggataaaattgctttggagcctataagaataaaaaaaggtgctcctatttcatctttaataagtactgtcggtgttcagactataatcaacaactccgttcttttaattttcggcacagttccattatactttcctgatttattaaagctgggtaaatttactatttatggcggaactgtggttcaatggattcaggttctcatattgattatgactttaattataatgcttgtattaacttttattgttacgcgtacacgcttaggaaagtcaatgcgggcaatttctcaaaatcaagttgctgcaagacttatgggaataaatataaatagagttataacccttacattctttataggaactacagttgccggtatttcaggtttaatggttgcaatgtattatcaaagagtagataccttaatgggggcatctgtaggattaaagtcatttgctgcagcagttcttggcggaatgggctctctccccggagcggctataggaggattattgataggcttacttgaaactctttttgccgcttatataagttcaggatatagggatattgttgcatttgtgatattgatattggttcttcttattcggccctcaggcttaatgggtaaaaaaagtgtagataaggtatag

SEQ ID NO: 649 - protein, 299 aa, Treponema denticola
MLLQQLINGLVIGSTYALVTIGFNMVYGVLELTNFAHSSFYMLAAYIGQFILLKFFMTVSVPIALIITFLTSIIITAFLGALMDKIALEPIRIKKGAPISSLISTVGVQTIINNSVLLIFGTVPLYFPDLLKLGKFTIYGGTVVQWIQVLILIMTLIIMLVLTFIVTRTRLGKSMRAISQNQVAARLMGININRVITLTFFIGTTVAGISGLMVAMYYQRVDTLMGASVGLKSFAAAVLGGMGSLPGAAIGGLLIGLLETLFAAYISSGYRDIVAFVILILVLLIRPSGLMGKKSVDKV

SEQ ID NO: 650 - DNA, 1020 bp, Treponema denticola
  CDS (1)..(1020)
atgagaaaaaaatcgattatcttagataaaatgattaaaaaaatcgctaaaaatcagatatttgttttaattatacttgctgttctggcaatatctttcccgatttttgttgacaataattactatcttggcatagcaataatgttctttatatattcaatattgaccttatctcttaatttagttacgggttatgttggatttacacttttgggacaagcggcttttttcggtttgggggcttatgttgctgcaatacttggaacgcgttttcaagttgattttattatcggatgtatagcagcctctttatttgctggtatttttggagcaatgctggctctcccgactttgcgcatacgcggccgatattttgcaattgtaactctaggtttttctgaaatcatgcgaatgatagagcttaactggatggagatgacgcgaggccctcagggaatttcaaggataccgggtatagtaatttttgggaaagagtttgactcatacagatttaagtactatgttgggctggttcttttaatatttgccttatatataattaattcaattttaaattcaaaacatgggcgtgccgtacgcgcaataaaagatgacgatttagctgccggagctattggagtaaatgtttataaatataccgttattatattttctatttcagcgggtattgcaggaatggccggagcctattacgctcattatatgagttttattgatcctaatgcttttaattttgaacaatcaattttaattttatcgatggccatatttggcggattgggaagtttgcccggaagtattttaggagctctggcattgactattttacctgaagccctcagatttttatccgattatcggcaaattatatatggtcttatattggttttgatagttatatttaaaccctcaggtgttatgggtaagataaattttgaacggatacgatctatagcaaatatggaaaaggaggacttaaatgtcgaatccaattcttaa

SEQ ID NO: 651 - protein, 339 aa, Treponema denticola
MRKKSIILDKMIKKIAKNQIFVLIILAVLAISFPIFVDNNYYLGIAIMFFIYSILTLSLNLVTGYVGFTLLGQAAFFGLGAYVAAILGTRFQVDFIIGCIAASLFAGIFGAMLALPTLRIRGRYFAIVTLGFSEIMRMIELNWMEMTRGPQGISRIPGIVIFGKEFDSYRFKYYVGLVLLIFALYIINSILNSKHGRAVRAIKDDDLAAGAIGVNVYKYTVIIFSISAGIAGMAGAYYAHYMSFIDPNAFNFEQSILILSMAIFGGLGSLPGSILGALALTILPEALRFLSDYRQIIYGLILVLIVIFKPSGVMGKINFERIRSIANMEKEDLNVESNS

SEQ ID NO: 652 - DNA, 885 bp, Geobacter sulfurreducens
  CDS (1)..(885)
atgaatttaggccagcagatagcgcaatatcttctctccggactttcgacgggagccatctattccctgatcggggtcgggtttgccatcattcacaatgccacaggcattatcaatttcgcccaaggcgaactcgtgatgcttggcggcatgttcacgctcttttttctgacagccctgaatctgccgctgctggtagccataatcctggcaatcggcgccaccaccctcgtgggcgtagtgttcgaacgtctcgccatccgtcccatgaagaatgcctcgcctatcagcctcgtcatcatcacgatcggcggcagcattctcatccgcggcattgccatgatcgtctggggcaaggacactcacgccattcccacattctcgggcaatgagccgatccatctgggcgaggcaaccatccttccacagcacctctggatatttgcggtgaccattgtggtcatgatctgcagcaaactctacttcaactacaccatcagcggcaaggccatgcgtgcctgcgcctacaaccgtcgggccgccggtctcgtggggatcgacgtgcggcgcatggtgcttttttcctttgccatcagctctgccatgggttccctggccggtatcatcatcgctccgctcaccatgacctcctatgatgttggcatcatgctcggcctcaaaggattctgcgccgccatcatcggcggcatgagcagcggcctcggcaccatcctgggcggcattctcctcggcatcctggaatcgcttggcgctggacttttctcatccggctataaggacgccattgcctttatcatcctgttgctgattctctttgtacgtccccagggattgttccgcaagggcgagaccgagcgtgtctaa

SEQ ID NO: 653 - protein, 294 aa, Geobacter sulfurreducens
MNLGQQIAQYLLSGLSTGAIYSLIGVGFAIIHNATGIINFAQGELVMLGGMFTLFFLTALNLPLLVAIILAIGATTLVGVVFERLAIRPMKNASPISLVIITIGGSILIRGIAMIVWGKDTHAIPTFSGNEPIHLGEATILPQHLWIFAVTIVVMICSKLYFNYTISGKAMRACAYNRRAAGLVGIDVRRMVLFSFAISSAMGSLAGIIIAPLTMTSYDVGIMLGLKGFCAAIIGGMSSGLGTILGGILLGILESLGAGLFSSGYKDAIAFIILLLILFVRPQGLFRKGETERV

SEQ ID NO: 654 - DNA, 1158 bp, Agrobacterium tumefaciens
  CDS (1)..(1158)
atgcctatccggcgccgatcaaaccgctgccctattcggcctatggggagacggaaagcaatctgttctgcaccaccaacggtctcgacgcagcaaagctcaaaggctgacccctccccgcgtggtcccgccgaaccatgtttggcgggacaaagtctcggcaaggcggatctgcgttttttgtctgctcggcaccaacccgatttcggcaatggtaagaagcagaacaaagtctggtccgcccttctcacgaacggtggcgttatgctcgacattctctttatcggtctcagtctcggctcgatccttcttctggtggcactcggtctcgccatcacctacggcgccatgggcgtcatcaatatggcccatggcgaaatggtcatgatcggcgcttatgtcgccgtcctctcaggtatctggctgaaaactagccttctgcttgcaatacccctggcttttgtcgtgacggcgttgctcggcctgataatcgagcgggtggttgtgcggcgactctacggccgcctgctggacacgcttctcgccacctggggcattgccatccttctgcagcaagccgtaaggctcgaactgggcctcacctttttaggcattcatatagaagggctgggagctggactgcaaaatgtggccgtgccttcatatctgcagggcactttcaggttcgccggcgccgacatcaacgcgtatcgcaccttcatcatcgcggtgaccgccgcgctgacgctggcgacatggttcatcctctaccggacgacagccggcatgcaggtgcgcgccatcattcgcaacccgaagatggctgcggcctgcggcatcgatgtaaaacgcattaacgcgctcactttcgccttcggttccggtctcgccggtgttgcgggggtcatgatgtccggcttcaagaccgtgttcccggatatgggcacaacgatggtcgtggacggtttcatggtcgtggtaacgggcggcgtcggcagtctcttcggtacggccctgtcttccgggcttctcggcgaaatcaacgcgctggtggccatcggcacgaacgacattctggcgcgcgccgtcgttttcggggtcgtcatcctcgtcattctcgtaaagcccagcgggctgttctccttcaaggggcgctga

SEQ ID NO: 655 - protein, 385 aa, Agrobacterium tumefaciens
MPIRRRSNRCPIRPMGRRKAICSAPPTVSTQQSSKADPSPRGPAEPCLAGQSLGKADLRFLSARHQPDFGNGKKQNKVWSALLTNGGVMLDILFIGLSLGSILLLVALGLAITYGAMGVINMAHGEMVMIGAYVAVLSGIWLKTSLLLAIPLAFVVTALLGLIIERVVVRRLYGRLLDTLLATWGIAILLQQAVRLELGLTFLGIHIEGLGAGLQNVAVPSYLQGTFRFAGADINAYRTFIIAVTAALTLATWFILYRTTAGMQVRAIIRNPKMAAACGIDVKRINALTFAFGSGLAGVAGVMMSGFKTVFPDMGTTMVVDGFMVVVTGGVGSLFGTALSSGLLGEINALVAIGTNDILARAVVFGVVILVILVKPSGLFSFKGR

SEQ ID NO: 656 - DNA, 903 bp, Wolinella succinogenes
  CDS (1)..(903)
atgatggatattttaaccttttttcaacagttaattaatggcgtaagccttgggagcatgtacgctctcattgcgattggctatacgatggtttatggggtcttgcgcctcataaacttcgcgcacgcggatgtgatgatggtgggcgcttttttagtgttttttggggtctctagctttgctctccctttttgggcggctgcattgctttcgattcttttttcagcgcttcttggagtggtgatcgacaagattgcctacaaacccttaagaaacgccccccgaatctccatgctcatcacggctattggtgtgagctttttcttggagaacatcttcaacgtcttttttggaagcactcccaaatcctttgaggctcccgcttttttcaatgagaccctctcgctttcgcatctcgttttgacccatatcgctctgattgttcctttggtgacgctccttcttttggggatcttgctctatgtgctctatcgcaccaagcaagggatggccattagagcggtggcgtttgatgtgaacaccgtgaggctcatgggggtggatgccaatcaaattatctctatcgtctttatcatgggaagtgctctagcggccgtgggagggattttttatgcgattagctaccccaccattgatccgctaatgggggttcttattggccttaaggcgtttgcagccgcggttttgggcgggattggaagcgtgacgggcgcagtgcttggaggatttatccttggattcactgaggtggttgtggtggcgctatttcctgaattaagcggctataaggatgcctttgccttcctctttttaattctagtgcttctctttagacctgtgggaatcatgggggatgagcgcttggagaggagtcgattctaa

SEQ ID NO: 657 - protein, 300 aa, Wolinella succinogenes
MMDILTFFQQLINGVSLGSMYALIAIGYTMVYGVLRLINFAHADVMMVGAFLVFFGVSSFALPFWAAALLSILFSALLGVVIDKIAYKPLRNAPRISMLITAIGVSFFLENIFNVFFGSTPKSFEAPAFFNETLSLSHLVLTHIALIVPLVTLLLLGILLYVLYRTKQGMAIRAVAFDVNTVRLMGVDANQIISIVFIMGSALAAVGGIFYAISYPTIDPLMGVLIGLKAFAAAVLGGIGSVTGAVLGGFILGFTEVVVVALFPELSGYKDAFAFLFLILVLLFRPVGIMGDERLERSRF

SEQ ID NO: 658 - DNA, 1110 bp, Gloeobacter violaceus
  CDS (1)..(1110)
atgctaaaatccagccaatttcgatggggtccaattggttcggtggcacagcttcccattcggcaaacgatttttcagtggagcgaacgcctgccggcaccgctcaggcgctacgggcttttgggtgtgggcctgctcatcccggcattgatgctgctcacttcccagccgagctacctggccaatgtcgcggtgaccgtggcggtttacatggtgctggccatggggctcaacatcgtggtcggcctggcgggcctgttggatctgggctacatcgcctttttcgcggtgggcgcctatacctacgccatcggggcgccccatggcctcagcttctggctcgccctgccggtggctgcactgcttgccgccggtttcggggtgcttctgggggcaccgactttgcccttgcgcggcgactacctggccatcgtcaccctcggtttcggcgaaatcatccgcatctcgctcaacaacctcgactggctcacccgcggtccggcgggcatcagcggtgtacccgcacccgtgatcccctggataggcgccaaaggcttcacctggctcacgctctatcagccgctgcaactctatttcatcgcgcttgccttcgtcgcctttgtctactggatgaccagccgcctgaagcagtcgcgcgtcggccgcgcctgggtagccatccgcgaggatgagattgccgccgccgccatgggcgtcgacaccgtcaagctcaagctcctggccttcgccaccggggcggccctggccggcatggtcggggtgctctttgccgtgcagctcacctatgtctcccccgacagcttcaccctgatcgaatcggtgatggtcgtctcgatggtggtcctgggagggatgggatcggtgcccggggtggcccttggggctttgatcctaattgtcctgccggaggcgctccggggcttttccgagtaccggctgctgttatttggcgcggcgatgatcctggtgatgctcatccgtccccagggattattgggcgagcggcagggcgtgccgccccggcctacaggagccggtcttgaagacgaaacgccgctcgaagtcgaaaagcgcgacctgccggtgtaa

SEQ ID NO: 659 - protein, 369 aa, Gloeobacter violaceus
MLKSSQFRWGPIGSVAQLPIRQTIFQWSERLPAPLRRYGLLGVGLLIPALMLLTSQPSYLANVAVTVAVYMVLAMGLNIVVGLAGLLDLGYIAFFAVGAYTYAIGAPHGLSFWLALPVAALLAAGFGVLLGAPTLPLRGDYLAIVTLGFGEIIRISLNNLDWLTRGPAGISGVPAPVIPWIGAKGFTWLTLYQPLQLYFIALAFVAFVYWMTSRLKQSRVGRAWVAIREDEIAAAAMGVDTVKLKLLAFATGAALAGMVGVLFAVQLTYVSPDSFTLIESVMVVSMVVLGGMGSVPGVALGALILIVLPEALRGFSEYRLLLFGAAMILVMLIRPQGLLGERQGVPPRPTGAGLEDETPLEVEKRDLPV

SEQ ID NO: 660 - DNA, 1170 bp, Gloeobacter violaceus
  CDS (1)..(1170)
atgatagagcatccatcccactttgggacgggcggtggtacgctttggtgtgttcgccgcgctttgaggtttgctttgcaagaactggttcagcagctggtcaacggcatcacccttggcagtgtgtacgccctcatcgccctgggctacacgatggtttacggcatcctggaactgatcaattttgcccacggcgaagtgttcatggttggagctttcgtcgccctgggggtgttcgtggtgctgggcggcgcagggttgccctggtggttgctgctgcttgcggctctgctgtgtgcgatggccgtctgctcgctgctgggtatggggcttgaacgcctcgcctaccggccgctcctgagcgaagcgaaaccgctcggggcggtggaactgggcgtgatcgcggcaagcggcagcggcatctggtggctgtaccatcagctcaaaggcggcctatcccaggcggagtggtggttggggccggcggtgggtctgggggccgccgccgcgttttgggggctttttgcttaccttggccgcagcggtccggcgcgcaagacgccgcgcctgtcgctgctgatcacggcgctgggggcctcgattttgctgcagaacgccatgcgcctcatcgtcggcagccgcgatcggatcctgcccgaggtgctgccggcgtggagctttacgctggcgggggtgcagattaccgcgccgcaaatactgacggtgggggtgagcgttacggcgatggtcttgctcacctggctggtgcagagcacgcgcttgggcaaggcgatgcgcgccacggcccaggacatcgaggcggcccagttgatgggcatcaacacccgcctgatcatcgtcatcgtctttgtcctcggctccagcctggcggcggtagcaggggttctgttcggcatattctttaaatcgatcaattttttcatcggcttccaggccggtctcaaggcgttcaccgccgcggtcttgggaggaatcggcaacattcctggggcggtgttgggagggctgttgctcgggttgctcgaatcactggggtcgggctatatttcgagtgaatggaaagacgtatttgcgtttatagtgctggtcggtgtgcttttgcttcgcccctcggggcttctgggcgagaatgtgcccgaaaaagtttga

SEQ ID NO: 661 - protein, 389 aa, Gloeobacter violaceus
MIEHPSHFGTGGGTLWCVRRALRFALQELVQQLVNGITLGSVYALIALGYTMVYGILELINFAHGEVFMVGAFVALGVFVVLGGAGLPWWLLLLAALLCAMAVCSLLGMGLERLAYRPLLSEAKPLGAVELGVIAASGSGIWWLYHQLKGGLSQAEWWLGPAVGLGAAAAFWGLFAYLGRSGPARKTPRLSLLITALGASILLQNAMRLIVGSRDRILPEVLPAWSFTLAGVQITAPQILTVGVSVTAMVLLTWLVQSTRLGKAMRATAQDIEAAQLMGINTRLIIVIVFVLGSSLAAVAGVLFGIFFKSINFFIGFQAGLKAFTAAVLGGIGNIPGAVLGGLLLGLLESLGSGYISSEWKDVFAFIVLVGVLLLRPSGLLGENVPEKV

SEQ ID NO: 662 - DNA, 1092 bp, Chromobacterium violaceum
  CDS (1)..(1092)
atggatctgaatcatctgagcaccggcaagaaaatggcggtcttcgccgcctgcgcggtccttctggccgtgctgcccttcctggtcggcggcgcgctgggcaattcctgggtgcgcatcatcgacttcgcgctgctgtacgtgatgctggcgctgggcctgaacatcgtggtgggcttcgccggcctgctggacctgggcttcatcgccttctacgcgatcggcgcctatacctacgcgctgctgagctcgccgcacttcgacatccactggctattcttcctcaccattccgctgggcgcggccttcgcctcgctgggcggggtgctgctgggcacgccggtgctgaagctgaagggcgactacctggccatcgtgaccctgggtttcggcgagatcgtgcgcatcttcatgaacaacctgaaccagccggtcaacatcaccaacggtccccagggcatcaacctgatcgacccgatccacatcggcggcgcgtcgctgggccagaccatcgagctgttcgggctgagcttccacaacgtctacctgtactactacctgttcctggcgctgaccgtgctggtggtgatcatggcctggcgtctgcagcactcccgcatcggccgcgcctgggtggcgctgcgcgaggacgacatcgccgccgcggcgatgggcatcaacatccgcaacatcaagctcttggccttcggcctgggcgccttgtccggcggcgtggccggcggcctgttcgcctcgttccagggcttcgtgtcgccggaatcgttcagcctgctggagtccatcatgatcctggccatgatcgtgctgggcggcatgggccacatcccgggcgtgatcctgggcgccgtggtgctgaccatcgcgccggaaatcctgcgcgacgtgatcggcccgctgcagatgaagaccgtcggccgcatgctgatcgacccggaaaacgcccgcatgctgctgttcggcctggcgatggtggtgatgatgctggtccgtccggaagggatgtggccgtccaagcggcgcaaggctgagttccagcacgccaaagaagacgccgcggtgcagaaaggttaa

SEQ ID NO: 663 - protein, 363 aa, Chromobacterium violaceum
MDLNHLSTGKKMAVFAACAVLLAVLPFLVGGALGNSWVRIIDFALLYVMLALGLNIVVGFAGLLDLGFIAFYAIGAYTYALLSSPHFDIHWLFFLTIPLGAAFASLGGVLLGTPVLKLKGDYLAIVTLGFGEIVRIFMNNLNQPVNITNGPQGINLIDPIHIGGASLGQTIELFGLSFHNVYLYYYLFLALTVLVVIMAWRLQHSRIGRAWVALREDDIAAAAMGINIRNIKLLAFGLGALSGGVAGGLFASFQGFVSPESFSLLESIMILAMIVLGGMGHIPGVILGAVVLTIAPEILRDVIGPLQMKTVGRMLIDPENARMLLFGLAMVVMMLVRPEGMWPSKRRKAEFQHAKEDAAVQKG

SEQ ID NO: 664 - DNA, 930 bp, Chromobacterium violaceum
  CDS (1)..(930)
atggacatttttctgcagcaaatcctgaacggtctcgttctgggtagcatctacgcgctgatcgcgctgggctacaccatggtgtacgggatcatgggcctgatcaacttcgcccacggcgaagtggtgatgttcggcgccatggtcaccatcaccgtcatcaccaccctgatggggatgggcatcaacctgccggggccggcgctggtgctgatcggccttctggtggccattcccgcctgcatgctgctcggcttcaccatcgagcgcgtcgcctaccgcccgttgcggggcaagcagcgcctggcgccgctgatcaccgcgatcggcgtgtccatcgtgctgcaacaggtcgccatcctgatctggggccgcaactacatccccttcccgcagattctggaccatgatgtggtgagcattttcggcgccagcatcaccaagctgcagatcgtgatcatcgcgctgtgcctggccatcatggccggcctgctgctgatggtggaaaagaccaagctcggccgcgccatgcgcgccaccagccagaacccggccgtggccggcctgatgggcgtcaacgtcaacaccatcatctccgccaccttcgtcatcggttccggcctgggcgctatcgccggcgtgatggtggccaccaactacgaacaggcccactactacatgggcttcatgatcggtctgaaggccttcaccgccgcggtgctgggcggcatcggcaacctgggcggcgcggtggccggcggcattctgctgggcatcatcgaaagcctgggcgccggctacatcggctcgctgaccggcggcttcctggggtccaactaccaggacatcatcgccttcatggtgctgatcctggtgctgatcttccgtccgtccggcctgctgggcgaaaaaatggccgaccgcgcctga

SEQ ID NO: 665 - protein, 309 aa, Chromobacterium violaceum
MDIFLQQILNGLVLGSIYALIALGYTMVYGIMGLINFAHGEVVMFGAMVTITVITTLMGMGINLPGPALVLIGLLVAIPACMLLGFTIERVAYRPLRGKQRLAPLITAIGVSIVLQQVAILIWGRNYIPFPQILDHDVVSIFGASITKLQIVIIALCLAIMAGLLLMVEKTKLGRAMRATSQNPAVAGLMGVNVNTIISATFVIGSGLGAIAGVMVATNYEQAHYYMGFMIGLKAFTAAVLGGIGNLGGAVAGGILLGIIESLGAGYIGSLTGGFLGSNYQDIIAFMVLILVLIFRPSGLLGEKMADRA

SEQ ID NO: 666 - DNA, 1155 bp, Synechococcus sp
  CDS (1)..(1155)
atgcaactgctttttgaaagcctgttcaacggtgtggccattggctctgtcttgctgatggccgcgctcggactggccattgttttcggcctcatgggggtgatcaacctcgcccatggcgagctgatcatgcttggggcctacaccacctacgtggtgcagctgatcttcaaactgcctgtgctgcagccggtttacaacgcctacgtgctggtagcgcttcccctggccttcatcgtcagcggtgtggtcggcatcctgcttgaacgcaccgtgattcgccggctctatggcaacccgctggagacgttgctggcgacctggggtgtcagcttgattcttcagcagtttgtgcggagcgtgcccctggcccacgccgccggcctgatcctggcgctggtgctgggctttggcctgccggtgatcttgccgcagcgactgtttgacggtgccaaggcgcgctttgtacgcgctggcagctgggcggtttcggccctcgcaggtgtgttgctggctggtggcctggcctcacaaatcagtcgtatcgcccgagctacctcccgcaacgtggatgtcaccgcaccgaagtggatgcggggaggcatggagtggatggacatcacctttcctgtaccgcgcctggtgatcatcgtgatcacgatcgttgcggtggttggggtgacgtggttcctcaacaaaagcgtgtggggcatgcgcattcgtgccgtcacccagaaccgtgcgatgagtgattgcctgggcatccccacgcagacggtggacgtgctcaccttcggtatcggatccggtcttgccggtgtggctggtgttgcagtctccctactcggctccgttggtccgaacgtcggcggctcttacatcgtcggttgtttcatggtggtggtgctcgggggtgtcggcaatctgctcggcaccgtgctcgcctcctttgccattggatggctcaccgatctgatcggagctggtcgtctgctcacgatgtggcctgacatgccatctcctctggccgctgctgtggagttctttgccaccacgagcatggcccaggtgatggtgttcgctctgatcgtggtgttcctgcaattccgtcccgcgggtttgttcccgcagaagggacgcatggtggaggcctga

SEQ ID NO: 667 - protein, 384 aa, Synechococcus sp
MQLLFESLFNGVAIGSVLLMAALGLAIVFGLMGVINLAHGELIMLGAYTTYVVQLIFKLPVLQPVYNAYVLVALPLAFIVSGVVGILLERTVIRRLYGNPLETLLATWGVSLILQQFVRSVPLAHAAGLILALVLGFGLPVILPQRLFDGAKARFVRAGSWAVSALAGVLLAGGLASQISRIARATSRNVDVTAPKWMRGGMEWMDITFPVPRLVIIVITIVAVVGVTWFLNKSVWGMRIRAVTQNRAMSDCLGIPTQTVDVLTFGIGSGLAGVAGVAVSLLGSVGPNVGGSYIVGCFMVVVLGGVGNLLGTVLASFAIGWLTDLIGAGRLLTMWPDMPSPLAAAVEFFATTSMAQVMVFALIVVFLQFRPAGLFPQKGRMVEA

SEQ ID NO: 668 - DNA, 1155 bp, Prochlorococcus marinus subsp
  CDS (1)..(1155)
atggaattgcttcttgatagtttattcaacggtatagcgatcggatcagttttactagtagcagctttgggcttagctattgtatttggtttgatgggtgtaatcaatcttgcacatggtgaactaatgatgctaggtgcttacacaacatatgtaactcaattaattttcaaactcccactattaaaaccctattacaacgcttacgttatagtttctatattttttgcatttattgtcagtggagtagtaggaatacttttagaaaaaactgtaattagaaagttatacggaagtccattagaaactttacttgcaacatggggagtaagccttattcttcaacagtttgtccgcagtgttcctttagcttatgggacaggactagtaataagtctcataataggtttatttctaccatcagtattttcatcaaaagtaaaagagtctataaattttaaatatgtaaaatttagttcatggatatttgcagctttagcgggagttctctccggtaatttaatttcatcttcagttagcaaattaagtcgagctagtgcaagaaatgtggatgtcacggctccagcttggatgaggggtcaggttgaaatccttggaacagctttcccaaaaacaagattaatgataataataattactttaatatctgtgattgcaataactttatttttgaatcaaagtgcttggggtatgaggataagagcagtaactcaaaatagagaaatgagtgactgtcttggaatttcaacagaaaaagttgatgttcttacttttggaattggttctggattggcaggtgtagcaggagttgctgtatctcttttgggatcggttgggcctaatgttggaggaaattatatagttgggtgttttatggttgtagttttaggaggtgtagggaacctattgggtacaatttttgcctcttttggaataggaataatgactgatttaattggagctggtcgccttttatcaatatggcctgatatgcctctaccactatcaaatacaattaatttctttgcaactaccagtatggctagagttatgatttttgcgttaatagtaatattcctgcaattcaaacctactggtttattcccccagaaaggaaggatggttgagagttaa

SEQ ID NO: 669 - protein, 384 aa, Prochlorococcus marinus subsp
MELLLDSLFNGIAIGSVLLVAALGLAIVFGLMGVINLAHGELMMLGAYTTYVTQLIFKLPLLKPYYNAYVIVSIFFAFIVSGVVGILLEKTVIRKLYGSPLETLLATWGVSLILQQFVRSVPLAYGTGLVISLIIGLFLPSVFSSKVKESINFKYVKFSSWIFAALAGVLSGNLISSSVSKLSRASARNVDVTAPAWMRGQVEILGTAFPKTRLMIIIITLISVIAITLFLNQSAWGMRIRAVTQNREMSDCLGISTEKVDVLTFGIGSGLAGVAGVAVSLLGSVGPNVGGNYIVGCFMVVVLGGVGNLLGTIFASFGIGIMTDLIGAGRLLSIWPDMPLPLSNTINFFATTSMARVMIFALIVIFLQFKPTGLFPQKGRMVES

SEQ ID NO: 670 - DNA, 1155 bp, Prochlorococcus marinus
  CDS (1)..(1155)
atgcaactgcttcttgaaagtcttttcaatggtgtggccatcggctcggtgctgctggttgctgccctcggactggcgatagtcttcggcctgatgggtgtcattaacctcgcccatggcgagttgatcatgctcggggcctacaccacttatgtggtacagctgatcttcaagctgcctgctctgcagcctttctacaacgcttatgtgttggtggcgattcctctggccttcatcgttagtggtgtggttggtatcttgctagaacgcaccgtgattcgtcgtctctacggcaacccgttggagacattgttggcgacatggggcgttagcctgattctgcagcagtttgtgcgcagttttccattggcttatgcggctggcttggtgctggcgttagtgcttggtttcagtctgccgatcattcttcctgacaagcttttgcaggggcctcgggcccgcttggtgcgtgctggaagctggcttgtgtcggctctggctggggtgttactggcgggtggtttggcctctcagatcagtcgtatcgctcgtgcgacctctcgcaatgtcgatgtcacggcacctaagtggatgcgtggggggattgaactgtcgggcatgaccttccctgtaccacgcttggtgatcattgtgatcacgatcctcgctgtactcggtatcacctggtttttgaatcgcagtgtgtgggggatgcgcatcagggcagtgactcagaatcgttccatgagtgattgccttggaatctcaaccgatactgtggatgtgcttacctttggtatcggctccggtttggctggcatcgctggggtcgcggtgtctttgttgggctccgtgggacccaacgtcggcacttcttatatcgttggttgcttcatggtggtggtgcttggaggtgtgggaaatctgttcggtaccgtgttggcctcctttgctattggggtgctaacagacctgatcggtgctggccgtttgctcagtatctggccttcgatgcctgcgcctttggcgagtgtggttgatttttttgctaccacgagcatggcccaggtaatggtgtttgcgctgattgtggtgttcctgcagttccgacctgctggtctgtttccccagaggggacgcatggtggaggcttaa

SEQ ID NO: 671 - protein, 384 aa, Prochlorococcus marinus
MQLLLESLFNGVAIGSVLLVAALGLAIVFGLMGVINLAHGELIMLGAYTTYVVQLIFKLPALQPFYNAYVLVAIPLAFIVSGVVGILLERTVIRRLYGNPLETLLATWGVSLILQQFVRSFPLAYAAGLVLALVLGFSLPIILPDKLLQGPRARLVRAGSWLVSALAGVLLAGGLASQISRIARATSRNVDVTAPKWMRGGIELSGMTFPVPRLVIIVITILAVLGITWFLNRSVWGMRIRAVTQNRSMSDCLGISTDTVDVLTFGIGSGLAGIAGVAVSLLGSVGPNVGTSYIVGCFMVVVLGGVGNLFGTVLASFAIGVLTDLIGAGRLLSIWPSMPAPLASVVDFFATTSMAQVMVFALIVVFLQFRPAGLFPQRGRMVEA

SEQ ID NO: 672 - DNA, 885 bp, Bordetella pertussis
  CDS (1)..(885)
atggatttctttatccagatgatagtttcgggactgagcgtcggcgcggtctatgccctgatcgggctgggcctgaacctgacgttctggacgacccgcgtgctcaatttcgggcaggggtccgtcctcatggcaggcgccatgctgaccgcggtcatggtcggcgccggcgtcaatgtgtttctcgcggtgggcgtttcattgctcgtcaccgccttcatcctgtggatcgtcgagctggtcggcgtgcggcccatgcggcgcatgtccggcagcatgggctgggtggtctccacgctgggcatcggcatcttcctgcaggggatggccagctggctgttcggcacccaggcggtcgctttccccgacgtgctgttcagcagcgccgataccgtcgagttcatgggcgcctatatctcgctgcagtacatcgccgtgttcgtcatcagcgtgatgatcgtctgcctgatggagctgttcctgcggcattccatctggggctacggggtgcgcgcggtggcgcacgatcgcgacctggcggccctgatgggcataccggtgtaccgcgtggtcgtgttctcgttcctggtcagcggcgtgctggcgggcatcgccggcatcctggtgtcgcaggtctccggcaccgtggatccgaacttcggcctgcatctcctgattctcgccttcgtcgcggccgtggtcggcggcatgggcagcgcgttcggctcgctggtcggcggcctgatcctggggatcatggagaagctggtgggcggctacgtctcgcccgccgccgccgaggtggtggcgttcgtgctcttgattggcgtgctgacgattcgcccgcagggcttgttcggcaagcgtgaaaccgtgaaggtgtga

SEQ ID NO: 673 - protein, 294 aa, Bordetella pertussis
MDFFIQMIVSGLSVGAVYALIGLGLNLTFWTTRVLNFGQGSVLMAGAMLTAVMVGAGVNVFLAVGVSLLVTAFILWIVELVGVRPMRRMSGSMGWVVSTLGIGIFLQGMASWLFGTQAVAFPDVLFSSADTVEFMGAYISLQYIAVFVISVMIVCLMELFLRHSIWGYGVRAVAHDRDLAALMGIPVYRVVVFSFLVSGVLAGIAGILVSQVSGTVDPNFGLHLLILAFVAAVVGGMGSAFGSLVGGLILGIMEKLVGGYVSPAAAEVVAFVLLIGVLTIRPQGLFGKRETVKV

SEQ ID NO: 674 - DNA, 1797 bp, Bordetella pertussis
  CDS (1)..(1797)
atgaaccgcttcctgcttatcgcattcatcgtcgtgctggccggcctgccgctgctgtcggccacgcccgaattctggatcacgcaactcaactacatcggcctggccgccatggtggcgctggggctggtgctgctgaccggcgtgggcggcctgacctcgttcggccaggcggccttcgtgggcctgggcgcctacaccacggcactgctcaccacgcaatacgacatctcgccgtggctggcgctgccggtgggcctgctggtgacggccgtggtggcgttcctgctggggctgatcacgctgcggctgtcggggcattatctgccgctgggcaccatcgcctgggggctctcgctgtattacctgttcggcaacctggactggctcggcaagcatgacggcatcgccggcatcgagcccatcagcctgttcggctggtcgctggccagcggacgccatatttactacctgatctgggtgttcgtgctgctggcgctgtgggcgacgcgcaacctgctcgattcgcgtccgggccgcgccatccgcgccctgaagagcggcgccggcatggccgagtcgatgggggtcaataccggcatctacaaaatcgtcatcttcgtgtgggcggcgctgctggcctgcctgtcgggctggctgtatgcccatatgcagcgcgcggtcagccccagtccgttcggcctgaactacggcatcgaatacctcttcatggccgtggtcggcggcgccggccatgtctggggggcgctgctgggctcggcggtcatcctgggaatcaaggaccagctgcagaacatcctgcccaagctgatcgataccaacgccaacttcgaactgatcttcttcggcgtgctgatgatcctggtgctgcagtacgccagcaatggcctgtggcccattctgtcgggctggtgggagcgcgtcaccggcgcggccggctcgcggcgcaacatggcgccgccgccgcaagcgccggcgctgccgcaccgcgcccggccgcaggccggcgagctggtgctggaagtcgacagcatccgcaaggagttcggcggcctggtggcggtcaacgacattacgttcaaggtgcgcgccggcgaaatcatgggcctgatcggccccaacggcgccggcaagagcacgaccttcaacctgatcagcggcgtgctgccggccacgcgcggccaggtgcgcttcctgggcgatcgcatcgacggccgctcggcgcgcgagatcgccaagcgcggcgtgggccgcaccttccagcacgtgcagctgctgccgaccatgttggtgctggaaaacgtggccctgggggcgcacatgcgttcggacgtgggcgtgctgtcgggcgccttgcacagcgagcgcgcccgcgaggcccagctgctgcacgaagccgcgcagcagctgcagcgcgtcgggctgggcgactatctgtacgagcaggcgggcaacctggcgctgggccagcaacgcatcctggaaatcgcccgcgcgctggcgtgcgatccggtgctgctgatgctcgacgagcccagcctcgggctggcgccgcgcatcgtgcgcgagattttccatatcatcgcccggctgcgcgaaaccggcgtggcgatcctgctggtcgagcagaacgcccgcgccgccttgcaggttgccgattacggctacgtgctggaaaccggtgaaatcgtgctgcacggcccggcgcgcgaactggccggcaatccgcgcgtcatcgagagctacctgggcctgggcaagggcgcccaggactga

SEQ ID NO: 675 - protein, 598 aa, Bordetella pertussis
MNRFLLIAFIVVLAGLPLLSATPEFWITQLNYIGLAAMVALGLVLLTGVGGLTSFGQAAFVGLGAYTTALLTTQYDISPWLALPVGLLVTAVVAFLLGLITLRLSGHYLPLGTIAWGLSLYYLFGNLDWLGKHDGIAGIEPISLFGWSLASGRHIYYLIWVFVLLALWATRNLLDSRPGRAIRALKSGAGMAESMGVNTGIYKIVIFVWAALLACLSGWLYAHMQRAVSPSPFGLNYGIEYLFMAVVGGAGHVWGALLGSAVILGIKDQLQNILPKLIDTNANFELIFFGVLMILVLQYASNGLWPILSGWWERVTGAAGSRRNMAPPPQAPALPHRARPQAGELVLEVDSIRKEFGGLVAVNDITFKVRAGEIMGLIGPNGAGKSTTFNLISGVLPATRGQVRFLGDRIDGRSAREIAKRGVGRTFQHVQLLPTMLVLENVALGAHMRSDVGVLSGALHSERAREAQLLHEAAQQLQRVGLGDYLYEQAGNLALGQQRILEIARALACDPVLLMLDEPSLGLAPRIVREIFHIIARLRETGVAILLVEQNARAALQVADYGYVLETGEIVLHGPARELAGNPRVIESYLGLGKGAQD

SEQ ID NO: 676 - DNA, 882 bp, Bordetella pertussis
  CDS (1)..(882)
atgagcggactgattatccagggcctggtcaacggcctgatcctgggcgccatctacggcctgatcggcgtgggcctgaacgtgatcttcggcgtgctgcgcgtggtgaacttcgcgcacggcgagttcctggtgctgggcgcctactttgcctactacctgctcgaatacgccggcatcgacccgctgctggcattgccgctggccttcggcgccttcttcctggccggctacgtgctgtatttcgtgctgatcccgcgcctgtccaaggccgacgaccccgaaatcagctcgctgctgctcatgttcggcgtgtccatcatgctgggagccatcatgctgctggccttcgaggccgacgcacgttcgctgccctacgagatcgaaccggtgttcttcaagatcgggccggtgctgatcccgaccgtgcgcctgatcgccctggccatcgcgctggccgtggtcgccgtgctggcctggttcctgtaccgcacccagttgggcaaggcgctgcgcaccatcatcatgaaccgcgacgccgtgcgtatcgtcggcatcaacgtcgagcggctgtcggccgtggcgttcggcctgggcatcggcctggccgccgtcacgggcgtgctggtggccatggtgttcccggcattttcccccttcatgggcaacgactacaccctgatcggcttcatcgtcatcgtgctgggcgggctgggccatcccgtgggtgcgctggtcggcgccatgctgttcggcgtcaccgaacaggtttcggtggtgttcttcaacccctccatcgccacgatctgcggcttcgtgctgatggtggccatgatcttcgtgcggcccaccgggctgttcggccaccgcgccctgcgctga

SEQ ID NO: 677 - protein, 293 aa, Bordetella pertussis
MSGLIIQGLVNGLILGAIYGLIGVGLNVIFGVLRVVNFAHGEFLVLGAYFAYYLLEYAGIDPLLALPLAFGAFFLAGYVLYFVLIPRLSKADDPEISSLLLMFGVSIMLGAIMLLAFEADARSLPYEIEPVFFKIGPVLIPTVRLIALAIALAVVAVLAWFLYRTQLGKALRTIIMNRDAVRIVGINVERLSAVAFGLGIGLAAVTGVLVAMVFPAFSPFMGNDYTLIGFIVIVLGGLGHPVGALVGAMLFGVTEQVSVVFFNPSIATICGFVLMVAMIFVRPTGLFGHRALR

SEQ ID NO: 678 - DNA, 1950 bp, Bordetella pertussis
  CDS (1)..(1950)
atggatctgacaggttttctggcccagctgctcaacgggctggccgaggcatcgtcgctgttcctggtggcggcggggctttcgctgattttcggcgtgacgcgcatcgtcaatttcgcgcacggctcgctctacatgctgggcgtgtacgtggcgtattcgatcgtcgagcgcgtgggcggcaccgcgctgggcttctggttcggcctggtggccgcgtcgctggccgtcggcgtggtgggcgcggcgatcgaggtcgtgctgttgcgccgcatctatcgcgcgccggagctgttccagttgctggcgaccttcgccctggtgctggtcatcaacgacgccgcgctgtggatctggggcgccgaggatctgctggggcggcgcgcgccgggcctgaccggcgcgatcgacctgctgggccgccggtatccggtctacaacctggtgctgatcgtggtcgggccggtggtgctggggctgctctggctgctgctgacgcgcacgcgctggggcaccctggtgcgcgcggccacgcaggaccgcgagatgctcggcgcgctgggcgtgaaccaggcctggctgttcaccggcgtgttcgcgctgggcgccatgctggccgggctgggcggcgcgctgcagctgccgcgcgagccggccagcctgagcctggacctgcgcaccatcggcgatgcgttcgtcatcgtggtggtgggcggcatgggatcgattccgggggcctatgtggccgcgctcatcatcgccgagatcaaggcgctgtgcatcggcctgggcaccgtgaccctgctgggcttgagcatttcgttttccaagctgacgctggtggtggagttcgccttcatggcgctggtgctggtgttccgcccctggggcctgttcggacgcccgcagggcgccagccgcaactcggcgcccatcgaggcgccgctgcggccggccgcgccgcgcctgcgcatcctgtggggcgtcctgctggcctccctggcggtgctgccgctgctggcgcagtggcttccgtacgcggtggtgctgacgcaggacatcctgatcgccgtgctgttcgccgttagcctgcatttcatgatggggccgggcggcatgcattcgttcggccacgcggcgtacttcgggctgggcgcgtacggcgcggccttgctgctgaaggccgcctcgctgcccatggaggccgcgctggccttcgcgccgctggtgggcgcgctgggcgcgctggtcttcggctggttctgcgtgcgcctgtcgggcgtctatctggccatgctgaccctggcgttctcgcagatcgtctggtcggtggtgttccagtgggacgacttcaccggcggctccaacggcatgatcggcgtctggccggccgagtggctgtccggcaccgcctactactatctggcgctggcggtggtcgcggccgccgtgctgggcctgcggcgcgtgctgttctcgccattcggctacgcaatgcgcgccgggcgcgattccagcctgcgcgccgacgccatcggcatcgacgtcaagcgggtgcagtgggcggctttcgtggtggccggcgcgttcggcgggctggccggagcgctgtatgcgttttccaagggcagcatttcgcccgacaccatggcggtcagcaaatcggtggacggcctggtgatggtgctgctgggcggcatccagaccctgatcggcccggtggtgggcgcgacggcgttcaacgtgctgcaggattacatcatgcgcgccaccgagtactggcgcgcgctgttcggcggcgtcatcctcctgctggtgctggtgttcccgcaagggatcgcgggattctgccggcaggcggggcaatggtggagcgcgcgcgccggcaaggaccggccgccgcgcaagggcggcgccttcatcggcggaccgcgggagaagcaggcatga

SEQ ID NO: 679 - protein, 649 aa, Bordetella pertussis
MDLTGFLAQLLNGLAEASSLFLVAAGLSLIFGVTRIVNFAHGSLYMLGVYVAYSIVERVGGTALGFWFGLVAASLAVGVVGAAIEVVLLRRIYRAPELFQLLATFALVLVINDAALWIWGAEDLLGRRAPGLTGAIDLLGRRYPVYNLVLIVVGPVVLGLLWLLLTRTRWGTLVRAATQDREMLGALGVNQAWLFTGVFALGAMLAGLGGALQLPREPASLSLDLRTIGDAFVIVVVGGMGSIPGAYVAALIIAEIKALCIGLGTVTLLGLSISFSKLTLVVEFAFMALVLVFRPWGLFGRPQGASRNSAPIEAPLRPAAPRLRILWGVLLASLAVLPLLAQWLPYAVVLTQDILIAVLFAVSLHFMMGPGGMHSFGHAAYFGLGAYGAALLLKAASLPMEAALAFAPLVGALGALVFGWFCVRLSGVYLAMLTLAFSQIVWSVVFQWDDFTGGSNGMIGVWPAEWLSGTAYYYLALAVVAAAVLGLRRVLFSPFGYAMRAGRDSSLRADAIGIDVKRVQWAAFVVAGAFGGLAGALYAFSKGSISPDTMAVSKSVDGLVMVLLGGIQTLIGPVVGATAFNVLQDYIMRATEYWRALFGGVILLLVLVFPQGIAGFCRQAGQWWSARAGKDRPPRKGGAFIGGPREKQA

SEQ ID NO: 680 - DNA, 927 bp, Bordetella pertussis
  CDS (1)..(927)
atgtcagacctcatcccacaacttacccagcagttcttcaacggactgtccctgggggcgatctacgcgttgattgccattggctacacaatggtctacggcatcatcggtatgatcaacttcgcccacggcgagatctacatgatcggcgcctacgtcggcctggtcacgctgacggccatcggcaccaacagcggcctgccgctgcctttcatcatcgccgccatgctggtggtcgccatcttcgtgaccggcgtctacggctatagcgtcgaacgcgtggcgtaccggcccgtgcgcggcagcccccgcctggtggcgctgatctcggccatcggcatgtcgatcttcctgcagaactgggtcgccctcgggcagggcgcgcgcgacatggccgtgccggcgctggtctcgggcgcggtgcagttccacatgggttccagcttcgacgtcaccgtaccgtattcgcgcatcatgatcatcgtggtgactgtggtgctgatggtggcgctcacgctgttcatcaagtattcgcgcatggggcgcgcctcgcgcgcctgctcgcaggacatgcacatggccaacctgctgggcatcgacaccaaccgggtgatttccttcaccttcgtgctgggcgccatgctggccgcggtgggaggcgtgctgatcgccatcaccatcggcaagctgaatccgttcatcggcttcctggcgggcatcaaggcgttcaccgccgcggtgctgggcggcatcggcagcattcccggcgcgatgctgggcggcgtgctgctgggcctggccgaaaccttcgcggccgcctacatctcatcgcaatacaaggacatcgtggcttttgcgctgctggtgctgatcctgctgttccgtcccaccgggctgctcggcaaacctgaggtggaaaaagtctag

SEQ ID NO: 681 - protein, 308 aa, Bordetella pertussis
MSDLIPQLTQQFFNGLSLGAIYALIAIGYTMVYGIIGMINFAHGEIYMIGAYVGLVTLTAIGTNSGLPLPFIIAAMLVVAIFVTGVYGYSVERVAYRPVRGSPRLVALISAIGMSIFLQNWVALGQGARDMAVPALVSGAVQFHMGSSFDVTVPYSRIMIIVVTVVLMVALTLFIKYSRMGRASRACSQDMHMANLLGIDTNRVISFTFVLGAMLAAVGGVLIAITIGKLNPFIGFLAGIKAFTAAVLGGIGSIPGAMLGGVLLGLAETFAAAYISSQYKDIVAFALLVLILLFRPTGLLGKPEVEKV

SEQ ID NO: 682 - DNA, 1239 bp, Bordetella pertussis
  CDS (1)..(1239)
atgacccaacaaagtcctctcaagaatgccacgatcgccgcggtcatgaccgccgtcatcgtgacgccgatcttcggcctgcagctggtgcgccagggcgcgcgcaccctgatggagccgcgctgggacctggtcgcgctggcctgcgcgctggtttttgcgttccaactgttgcgcccgtggatttccaagcccttcaaggcgctgaaaacaggcctgccgacgctgccgtcggcgctggcgcgcggccacaaatggctggtcgtgctgctgatcgccgtctcggtgatctggccgttcttcagcgggcgcagctcggtggacatcgccacgctggtgctgatctacgtcatgctgggcctggggctgaacatcgtggtcggcttcgccggcctgctcgacctgggcttcgtgggcttttacgcggtcggggcctatacctacgccttgctttaccactggggcggctggagcttctgggaagcgctgccgttctcgggcgcggtcgcggcgctgttcggcttcgtgctgggctttccggtgctgcgcctgcgcggcgactacctggccatcgtcacgctgggctttggcgaaatcatccgcctgctgctcatcaacctgaacatgctgaccggcggcccggacggcatatccggcctgcccaagcccagcgtgctgggcatggaaatggcgcgccgcgccagcacggaaggcggccagaccttccatgagatcatgggctggactttccagaaccagcacatggtgatctacctgtacctgatggcgctggcgttggcgctggcgacgctgttcgtctccacgcggctgatccgcatgccggtggggcgcgcctgggaggcgctgcgcgaagacgagatcgcctgccgctcgctgggcctgaaccccacgcgcatcaagctgtcggccttcacgctgggcgccatgttcgccggtttcggcggcgccttcttcgcggcccgccagggcatggtcaaccccgagtcgttcaccttcatcgaatcggcgctgatcctggccatcgtggtgctgggcgggatgggctcgcagatcggggtgatcctggcggcgatcctgctgacggtgctgccggagctggcgcgcgagttcgccgaataccgcatgctgatgttcggcctggtgatggtattgatgatgatgtggcgtccgcagggattgctgcccatgaagcgtccgcatgtggagctgcgcaaatag

SEQ ID NO: 683 - protein, 412 aa, Bordetella pertussis
MTQQSPLKNATIAAVMTAVIVTPIFGLQLVRQGARTLMEPRWDLVALACALVFAFQLLRPWISKPFKALKTGLPTLPSALARGHKWLVVLLIAVSVIWPFFSGRSSVDIATLVLIYVMLGLGLNIVVGFAGLLDLGFVGFYAVGAYTYALLYHWGGWSFWEALPFSGAVAALFGFVLGFPVLRLRGDYLAIVTLGFGEIIRLLLINLNMLTGGPDGISGLPKPSVLGMEMARRASTEGGQTFHEIMGWTFQNQHMVIYLYLMALALALATLFVSTRLIRMPVGRAWEALREDEIACRSLGLNPTRIKLSAFTLGAMFAGFGGAFFAARQGMVNPESFTFIESALILAIVVLGGMGSQIGVILAAILLTVLPELAREFAEYRMLMFGLVMVLMMMWRPQGLLPMKRPHVELRK

SEQ ID NO: 684 - DNA, 921 bp, Bordetella pertussis
  CDS (1)..(921)
atgacgtttacgttgatcgtcgagcagttgctgaacggtctgcagttcgggttgatgctgtttctgattgccgccggcctgaccctggtgttcggcatcatggacatcatgaatctggcgcacggctcgctttacatggccggcgcctatgtcgcggccgaaaccatgcagcgcaccgggtccttcacggcggcggtgctggtggccgcgctggccaccggcctggtgggcgcggtgctcgagctcacgctgatccgcaagctggcggtgcgcgaccacctggcccaggtgctgggcacctacgccgtcatcctgatcgccaatgacctggtcaagatgatctgggggccggcgcccgtcatgctcaacatgccagccgccctgtccggcccggtgcgcctgctgcccgatctgctgtatccggcctaccggctgatgatcatcgtgttcgggctggcggccgccgccggcctgtactggttcgtgacgcgcacgcgcgccggcgtgctggtgcgcgccggcgcctccaatcgccagatggcgaccctgatgggcgtgcgcgtgcccttgctgttcctgggcgtgttcgtgctgggcgcgatgctggccgcggtggccggcgcgttgctggggccggtgaccgccgtgcagatcggcatgggcgagggaatcctgatcctggtgctggtgtgcatcgtcatcggcggcatcggctcgattcgcggggccttcgtgggcgcgctgctggtcggcatggtcgacaccgccggccgggccttcctgcccatgctgctgcgccaggtgtttccgcccgccgtggcttccagcgtcgggccgacgctggcggccatcgcgatctatgtcctgatggcgggggtgctggtgttccggccggccggcctgtttccggcgcgcgggtga

SEQ ID NO: 685 - protein, 306 aa, Bordetella pertussis
MTFTLIVEQLLNGLQFGLMLFLIAAGLTLVFGIMDIMNLAHGSLYMAGAYVAAETMQRTGSFTAAVLVAALATGLVGAVLELTLIRKLAVRDHLAQVLGTYAVILIANDLVKMIWGPAPVMLNMPAALSGPVRLLPDLLYPAYRLMIIVFGLAAAAGLYWFVTRTRAGVLVRAGASNRQMATLMGVRVPLLFLGVFVLGAMLAAVAGALLGPVTAVQIGMGEGILILVLVCIVIGGIGSIRGAFVGALLVGMVDTAGRAFLPMLLRQVFPPAVASSVGPTLAAIAIYVLMAGVLVFRPAGLFPARG

SEQ ID NO: 686 - DNA, 1038 bp, Bordetella parapertussis
  CDS (1)..(1038)
atggactcttcaattgcgctgatcctgctgcaagacggtgtggtcaacggcgccatttatgccctgctgggcatggcgctggtactggttttcgccgtcacgcgggtcattttcattccgcagggcgagttcgtcgccttcggcgccctgacactggccatgctggtcgacggccgcgtgccgggcaccgcctacctgctgcccctgctgggcggcgtgtgcctgctgctggagctggtgcgcgcgctgcgcaccggcgcgtggggcgccatgcccaaggtgctggccggctgcgtggcgctgcccctggcgctgctgtggctgaccgacagctatgcggcgcagggcacctcgctgtggctgaacatgctgctgaccctggccctggtgatcccgatggggccgatggtctaccgcatcgtctaccagccgctggccgaggccacggtgctggtgctgctgatcgtgtcggtcgccgtgcacttcgcgttgatggggctggcgctggtgttcttcggcgccgagggctggcgtacgccggcattcgtcagcgggcaggtcgatctcgggttctcgacctggtcggcgcaaagcctgttcgtggtggccacctgcgcgctgctgatcgtggcgctgtggctgttcttcggcaagacgctgtacggccgcgcgctgcgggccaccgccgtgaaccggcgcggcgcgcgcctggtgggcatcagcaccaccatgtcgggcagcctgacattcaccctggcggtgtccatcggcgccatgtcgggcatgctgatcgcgcccatcaccaccgtgtattacgacaccggcttcctgatcggcctgaagggcttcgtgggcgccatcatcggcggcctggtgagctacccggtggccgcggccggcgcactgctggtcggcatcctggaggccttctcgtcgttctgggccagttcgtacaaagaagtcatcgtgttcaccctgattatcccggttctggtctggcgttcgttcagcagccgtcatgtggacgaagaggaataa

SEQ ID NO: 687 - protein, 345 aa, Bordetella parapertussis
MDSSIALILLQDGVVNGAIYALLGMALVLVFAVTRVIFIPQGEFVAFGALTLAMLVDGRVPGTAYLLPLLGGVCLLLELVRALRTGAWGAMPKVLAGCVALPLALLWLTDSYAAQGTSLWLNMLLTLALVIPMGPMVYRIVYQPLAEATVLVLLIVSVAVHFALMGLALVFFGAEGWRTPAFVSGQVDLGFSTWSAQSLFVVATCALLIVALWLFFGKTLYGRALRATAVNRRGARLVGISTTMSGSLTFTLAVSIGAMSGMLIAPITTVYYDTGFLIGLKGFVGAIIGGLVSYPVAAAGALLVGILEAFSSFWASSYKEVIVFTLIIPVLVWRSFSSRHVDEEE

SEQ ID NO: 688 - DNA, 1839 bp, Bordetella parapertussis
  CDS (1)..(1839)
atgaaccgcttcctgcttatcgcattcatcgtcgtactggccggcctgccgctgctgtcggccacgcccgaattctggatcacgcagctcaactacatcggcctggccgccatggtggcgctggggctggtgctgctgaccggcgtgggcggcctgacctcgttcggccaggcggccttcgtgggcctgggcgcctacaccacggcgctgctcaccacgcaatacgacatctcgccgtggctggcgctgccggtgggcctgctggtgacggccgtggtggcgttcctgctggggctgatcacgctgcggctgtcggggcattatctgccgctgggcaccattgcctggggactctcgctgtattacctgttcggcaacctggattggctcggcaagcatgacggcatcgccggcatcgagcccatcagcctgttcggctggtcgctggccagcggacgccatatttactacctgatctgggtgttcgtgctgctggcgctgtgggccacgcgcaacctgctcgattcgcgtccgggccgcgccatccgcgccctgaagagcggcgccggcatggccgagtcgatgggggtcaataccggcatctacaaaatcgtcatcttcgtgtgggcggcgctgctggcctgcctgtcgggctggctgtacgcccacatgcagcgtgcggtcagccccagtccgttcggcctgaactacggcatcgaatacctcttcatggccgtggtcggcggcgccggccatgtctggggggcgctgctgggctcggcggtcatcctgggaatcaaggaccagctgcagaacatcctgcccaagctgatcgataccaacgccaacttcgaactgatcttcttcggcgtgctgatgatcctggtgctgcagtacgccagcaatggcctgtggcccattctgtcgggctggtgggagcgcgtcaccggcgcggccggctcgcggcgcaacatggcgccgccgccgcaagcgccggcgctgccgcaccgcgcccggccgcaggccggcgagctggtgctggaagtcgacagcatccgcaaggagttcggcggcctggtggcggtcaacgacattacgttcaaggtgcgcgccggcgaaatcatgggcctgatcggccccaacggcgccggcaagagcacgaccttcaacctgatcagcggcgtgctgccggccacgcgcggccaggtgcgcttcctgggcgatcgcatcgacggccgctcggcgcgcgagatcgccaagcgcggcgtgggccgcaccttccagcacgtgcagctgctgccgaccatgtcggtgctggaaaacgtggccctgggggcgcacatgcgttcggacgtgggcgtgctgtcgggcgccttgcacagcgagcgcgcccgcgaggcccagctgctgcacgaagccgcgcagcagctgcagcgcgtcgggctgggcgactatctgtacgagcaggcgggcaacctggcgctgggccagcagcgcatcctggaaatcgcccgcgcgctggcgtgcgatccggtgctgctgctgctcgacgagccggccgccggcttgcgctacaaggaaaagcaggaactggccaaggtgctggaacagctgcgcgccgaggggctgagcatcctgctggtggaacacgacatggactttgtgatgcgactgaccaatcacctggtggtcatggatttcggcaccaagctggccgagggcgtgcccgccgatgtgcagaagaacccggcggtgctggaggcctatctgggcggtatcgacgacgatcttcccgacgccggccagggcgcgccggcagccgccggaggtgcgcaatga

SEQ ID NO: 689 - protein, 612 aa, Bordetella parapertussis
MNRFLLIAFIVVLAGLPLLSATPEFWITQLNYIGLAAMVALGLVLLTGVGGLTSFGQAAFVGLGAYTTALLTTQYDISPWLALPVGLLVTAVVAFLLGLITLRLSGHYLPLGTIAWGLSLYYLFGNLDWLGKHDGIAGIEPISLFGWSLASGRHIYYLIWVFVLLALWATRNLLDSRPGRAIRALKSGAGMAESMGVNTGIYKIVIFVWAALLACLSGWLYAHMQRAVSPSPFGLNYGIEYLFMAVVGGAGHVWGALLGSAVILGIKDQLQNILPKLIDTNANFELIFFGVLMILVLQYASNGLWPILSGWWERVTGAAGSRRNMAPPPQAPALPHRARPQAGELVLEVDSIRKEFGGLVAVNDITFKVRAGEIMGLIGPNGAGKSTTFNLISGVLPATRGQVRFLGDRIDGRSAREIAKRGVGRTFQHVQLLPTMSVLENVALGAHMRSDVGVLSGALHSERAREAQLLHEAAQQLQRVGLGDYLYEQAGNLALGQQRILEIARALACDPVLLLLDEPAAGLRYKEKQELAKVLEQLRAEGLSILLVEHDMDFVMRLTNHLVVMDFGTKLAEGVPADVQKNPAVLEAYLGGIDDDLPDAGQGAPAAAGGAQ

SEQ ID NO: 690 - DNA, 873 bp, Bordetella parapertussis
  CDS (1)..(873)
atgtcggaattcatgcagttcattttctcgggagtgacagtgggcgcggtctacgcgctcgtcgccctcgggttcgcgatcatcttcaacgcgaccggcgtggtgaactttgcccagggcgagttcgtcatgctgggcggcatgatcactgtcttcgcgcacggcgcgggcctggcgctgccgctggccgcgctgctcgccatcgccgtgaccgccgcgacaggcgtggcgctgaaccgcctggcgatcgagccggcgcgcggcgcccccgtcgtctcgctcatcatcatcaccatcggcgcctcgatcttcatccggggcgcggtgcaaagcctgttcggcaagcagatccacagcctgcccgcgttctcgggcgacgacccgatacacgtgctgggcgccaccatcctgtcgcaaagcctgtggatgatcggcggcgcggtggcggtattcatcgtcctgtggctgttcttcaccaggacactgataggccgcgcggtgctggccacctcgaacaaccgcctggcggcccgcctggtcgggatcaacacccgattcatcatgaccctgtcgttcgcgctgtcggcggccatcggcgccctggccggcgtgctgatcacgccgatcacgctgacttcgtacgacgtgggcctgaccctggcgctcaagggctttgccgccgccatgctgggcggcatgggcagccccaagggcgcgctggccggcggcattctgctcggcctgctggaatccctgaccgccggctacctgtcgtcgcagtacaaggacgcggcggccttcctcaccattctcgcggtgctgttcttcatgccgcagggactgttcggacacaagtccacggatcgcgtataa

SEQ ID NO: 691 - protein, 290 aa, Bordetella parapertussis
MSEFMQFIFSGVTVGAVYALVALGFAIIFNATGVVNFAQGEFVMLGGMITVFAHGAGLALPLAALLAIAVTAATGVALNRLAIEPARGAPVVSLIIITIGASIFIRGAVQSLFGKQIHSLPAFSGDDPIHVLGATILSQSLWMIGGAVAVFIVLWLFFTRTLIGRAVLATSNNRLAARLVGINTRFIMTLSFALSAAIGALAGVLITPITLTSYDVGLTLALKGFAAAMLGGMGSPKGALAGGILLGLLESLTAGYLSSQYKDAAAFLTILAVLFFMPQGLFGHKSTDRV

SEQ ID NO: 692 - DNA, 930 bp, Bordetella parapertussis
  CDS (1)..(930)
atggatattttcactcaacagataatcaatggcctgacgctgggcagcgtgtatgcgctggtcgcgctgggctatacgatggtgtacggcatcatcggcctgatcaacttcgcgcatggcgacgtggtcatgatcggcgcgatggcggcgaccatggtcgccgccgccctggtgggcggcgatccgtccacgtcggccttcgccgtcctcggcgccggcctgctggtctcggtgcccctgtgcatggccgtgggctggaccgccgaacgcgtggcgtaccggcccttgcgccgcgcgccgcggctggccgcgctgatcaccgccatcggcgtatccatcatcctgcagaacgtggcgatgatggtgtggggccgcaattacctcaactttccccaggtgctcacgcccgccgtgttcgagatcggcggggcgcgcatgagcatgctgcagatcgccatcgtggtcatcgccgcgctgatcatgggcgcgctgctgctggtcgtgcacaagacgcggctgggtaccgccatgcgggccaccgcgcagaaccgcgaagtggccggcctgatgggcgtgaacatcaacaccgtgatctcggcggccttcctgatcggttcggcgctggcggccatcgccggcatgatggtcaccacctattacggcgtgtcgcagtacaccatgggcttcatgctgggcctgaaggcgttcaccgcggcggtgctgggcggcatcggcaacctggtcggggccatggccggcggcctgctgctgggcatcattgaatcgctgggctcgggctatatcggcgacctgaccggcggcttcctcggcagccactaccaggatgtcttcgccttcgtggtgctggtgatggtgctgatcttccggccttcgggcttgctgggcgagcgcgtgggagaccgggcatga

SEQ ID NO: 693 - protein, 309 aa, Bordetella parapertussis
MDIFTQQIINGLTLGSVYALVALGYTMVYGIIGLINFAHGDVVMIGAMAATMVAAALVGGDPSTSAFAVLGAGLLVSVPLCMAVGWTAERVAYRPLRRAPRLAALITAIGVSIILQNVAMMVWGRNYLNFPQVLTPAVFEIGGARMSMLQIAIVVIAALIMGALLLVVHKTRLGTAMRATAQNREVAGLMGVNINTVISAAFLIGSALAAIAGMMVTTYYGVSQYTMGFMLGLKAFTAAVLGGIGNLVGAMAGGLLLGIIESLGSGYIGDLTGGFLGSHYQDVFAFVVLVMVLIFRPSGLLGERVGDRA

SEQ ID NO: 694 - DNA, 888 bp, Bordetella parapertussis
  CDS (1)..(888)
atgaacatcgaatccattctcggcattccgatcaatgcgttcatgggccagttgctgatggggctgatgaacggcgccttctacgccatgctgagcctgggcctggcgatcattttcgggctgctcaacgtgatcaatttcctgcacggcgcccagttcatggtgggggcgttcatcgcctggatgctgctggcgtgggcgggcctgagctactgggtcgccctgctggtggcgccgctggtcgtcgcgatcggcgccgtgttcgtcgagcgcctgttcctgcggcatctctaccgtctcgaccatctctacggcatgctgctgaccttcggcctgatgttgatggtcgaggggctgtttcgcaagagcttcggctcgtccgggcttgcctatcccaatgtcatccccggcggcatgaacctgggtttcatgttcctgccgtattaccgggcctgggtcgtggcggcctcgctgctcgtctgccaggccatctggctgctgatcgagaagacgcggctgggaagctatctgcgcgcggcgaccgagaacccggacatggtgcgcgccttcggcatcaaggttcccgtgctgctgacgctgacctacgcgttcggcgcggggctggccggcctggcgggcgtcatggcggcgccgatctaccaggtcagtccgctgatgggctccaacctggtcatcctggtcttcgccgtggtggtgatcggcggcatgggctcgatcctgggctcgatcctgaccggcttctcgctgggcgccatcgaaggcctgaccaaactcttctacccgcaggcctcggcgaccgtgatcttcctcgtgatgatcatcgtgctgctcatcaagccgacgggcctgttcggcaaggcgaagtga

SEQ ID NO: 695 - protein, 295 aa, Bordetella parapertussis
MNIESILGIPINAFMGQLLMGLMNGAFYAMLSLGLAIIFGLLNVINFLHGAQFMVGAFIAWMLLAWAGLSYWVALLVAPLVVAIGAVFVERLFLRHLYRLDHLYGMLLTFGLMLMVEGLFRKSFGSSGLAYPNVIPGGMNLGFMFLPYYRAWVVAASLLVCQAIWLLIEKTRLGSYLRAATENPDMVRAFGIKVPVLLTLTYAFGAGLAGLAGVMAAPIYQVSPLMGSNLVILVFAVVVIGGMGSILGSILTGFSLGAIEGLTKLFYPQASATVIFLVMIIVLLIKPTGLFGKAK

SEQ ID NO: 696 - DNA, 876 bp, Bordetella parapertussis
  CDS (1)..(876)
atgatgttcctgactctgttattggtgggtatcgtcagcggcgtgctgggagggctgatactggccctcctgtccaccggcttcaaccttgccctcggggtgtcccgcgtcgtgaacttccagcacggcgccgtagtgctttggtcgatgtacgcggcctacgtgctgtgggaggctaccggcatcaatccctatctcggcctgctgctgatcgtgccggtggctttcgccatcggctacttcctgcatcgctggctgatcatccgctcgctccagacccctgaagacagccagatcctgttctccatcggactgctgatcgccttccagtacctggcccagttcgtctattccacggacgcccgctcgctgaccgaggaaagcctgcagcattccctgatcatcggtccggtcatcctgcaatacacccggctcgccgccgccgccgtctcgctgctggtgctggtgttgctgcatctgatgctgacccgcaccgatctgggacgcaagctgcatgcgtgcgcccagaaccccgtcggcgcgcgggtggccggcctgaacgtcgagcacctttcggcggtagcgctgggcatcgcggccgcctgcgcggcggtcagcggcaccgccctggccaccatggcgcccatcttcccggaacgggccttcgagtactcgctggccgcggtggtggtgtcggtgctcggcgggatgggcagcatgagcggcagcatcctgggcggattgatcgtgggcgtcatcatcgccgtctcgcaggtcaccggccatggcgatctcgcgctcgccatcgtctatgcgctggttttcctcatcttcctggtccacccgacggggctgatcagtgcggtcaaacgttga

SEQ ID NO: 697 - protein, 291 aa, Bordetella parapertussis
MMFLTLLLVGIVSGVLGGLILALLSTGFNLALGVSRVVNFQHGAVVLWSMYAAYVLWEATGINPYLGLLLIVPVAFAIGYFLHRWLIIRSLQTPEDSQILFSIGLLIAFQYLAQFVYSTDARSLTEESLQHSLIIGPVILQYTRLAAAAVSLLVLVLLHLMLTRTDLGRKLHACAQNPVGARVAGLNVEHLSAVALGIAAACAAVSGTALATMAPIFPERAFEYSLAAVVVSVLGGMGSMSGSILGGLIVGVIIAVSQVTGHGDLALAIVYALVFLIFLVHPTGLISAVKR

SEQ ID NO: 698 - DNA, 882 bp, Bordetella parapertussis
  CDS (1)..(882)
atgagcggactgattatccagggcctggtcaacggcctgatcctgggcgccatctacggcctgatcggcgtgggcctgaacgtgatcttcggcgtgctgcgcgtggtgaacttcgcgcacggcgagttcctggtgctgggcgcctattttgcgtactacctgctcgaatacgccggcatcggcccgctgctggcattgccgctggctttcggcgccttcttcctggccggctacgtcctgtatttcgtgctgatcccgcgcctgtccaaggccgacgaccccgagatcagctcgctgctgctgatgttcggcgtgtccatcatgctgggggccatcatgctgctggccttcgaggccgacgcacgctcgctgccctacgaaatcgaaccggtgttcttcaagatcggaccggtgctgatcccgaccgtgcgcctgatcgccctggccatcgcgctggccgtggtcgccgtactggcctggttcctgtaccgcacccagatgggcaaggccctgcgcgccatcatcatgaaccgcgacgccgtgcgcatcgtcggcatcaacgccgagcggctgtcggccgtggcgttcggcctgggcatcggcctggccgccgtcaccggcgtgctggtggccatggtgttcccggcgttctctcccttcatgggcaacgactacaccctgatcggcttcatcgtcatcgtgctgggcggattgggccaccccgtgggcgcgctggtcggcgccatgctgttcggcgtcaccgaacaggtgtcggtggtgttcttcaacccctccatcgccacgatctgcggcttcgtgctgatggtggccatgatcttcgtgcggcccaccgggctgttcggccaccgcgccctgcgctga

SEQ ID NO: 699 - protein, 293 aa, Bordetella parapertussis
MSGLIIQGLVNGLILGAIYGLIGVGLNVIFGVLRVVNFAHGEFLVLGAYFAYYLLEYAGIGPLLALPLAFGAFFLAGYVLYFVLIPRLSKADDPEISSLLLMFGVSIMLGAIMLLAFEADARSLPYEIEPVFFKIGPVLIPTVRLIALAIALAVVAVLAWFLYRTQMGKALRAIIMNRDAVRIVGINAERLSAVAFGLGIGLAAVTGVLVAMVFPAFSPFMGNDYTLIGFIVIVLGGLGHPVGALVGAMLFGVTEQVSVVFFNPSIATICGFVLMVAMIFVRPTGLFGHRALR

SEQ ID NO: 700 - DNA, 876 bp, Bordetella parapertussis
  CDS (1)..(876)
atggacgtctacatgcaattgaccatgaacagtctgcagatcgccgcggcgtacatactgttctcgttgggcctgacgctgatcttcggcgtcatgcggatcgtgaacttcgcgcacggcgagttcttcaccctgcctctgctggtcatgggcgtgctggtgccgctgctggtcggcgcgcagctgccgctcatcgtgtcctatgcgctgagcggcgtgctgggcatcgcggccacgctgctgctgggcgggcttatctacaagttcgccctcaagcgcttcctgcgcgacatgaccggctctttcgtggtgtcggtcggcctctcgctgctgctgcaaggggtcttcctggagactttcggcggcgtgccgaccaagctgcccacgctggtggagggcacggtgaacatcctgggcgcgttcgttaccgtccagcgcctcatcatcaccggctgcgcgctgctggtggccgtgttcatgtgctggacgatcgtttccagccgcctgggcaaggccttgcgtgcggtggccgaggaccatgaggccgccatgctccagggcattccctaccgccgcatcgccctggccggcttcctcatcgcgaccgtgctcgcggcgatcgccgcggtcctgctttcgccggtcacggtatcgagcccgatcatcggcaacgactacctcatccgcggcttcatcgccatcgtgatcggcggcctgggcagcattcccggcgccatcctgggcagcgtcctgatcgcggtcatagagagcctgggcgggtattacttcgaccccacctgggccaccatcacgatgttcgccctgaccatgtttgtactgctcgttcgtccgaaggggatcctgggaaatggctaa

SEQ ID NO: 701 - protein, 291 aa, Bordetella parapertussis
MDVYMQLTMNSLQIAAAYILFSLGLTLIFGVMRIVNFAHGEFFTLPLLVMGVLVPLLVGAQLPLIVSYALSGVLGIAATLLLGGLIYKFALKRFLRDMTGSFVVSVGLSLLLQGVFLETFGGVPTKLPTLVEGTVNILGAFVTVQRLIITGCALLVAVFMCWTIVSSRLGKALRAVAEDHEAAMLQGIPYRRIALAGFLIATVLAAIAAVLLSPVTVSSPIIGNDYLIRGFIAIVIGGLGSIPGAILGSVLIAVIESLGGYYFDPTWATITMFALTMFVLLVRPKGILGNG

SEQ ID NO: 702 - DNA, 930 bp, Bordetella bronchiseptica
  CDS (1)..(930)
atgtttcgtcgcaaatatggaaccgcgctttgcgcgctggtcctcatcgcattgccggccctgctcaacgacccgttcatcacccacctgggcgtgcgggcggccacctacgccatcgtagtcatgggcctgacgctgttcgccggctacaccggccagatctcgctggggcacgccgccttcttcgggctggccgcctatctgtcgggcatgatggccaaggccggcgtgccctacctggtatcggtgccggtcgccacggccgcagtcggcgtgctgggctgcctggtcggcatgctggtgctgcgcaccagcggccactacctggcgctggccagcatcgccgtcgcggtcatcgtgcaggtcatcatcaagaacagcacgatcaccggcggcccttccgggttgacggccgtgcccgcgccggatttcttcggctggtcgctcaccagcgacctgggctactactactacgtgctgctgtgcatgttcgccggcttcgtcatcctgcgccgggtcatcgactcgcgcaccggcgacgccctgcaggccatcgccaacaacgaactggccgcccagtcgctgggcatcccggtgttccgctacaaggtgctgtcattcaccatcagcaccctgttcgcggcgttcgccggcaccctgttcgtgcactacgacggcttcatcgacccggacaggctgggcatccacgtctccgtgctgttcctgatcatgaccttcgtgggcggcatcggcaacatctacggctcggtgatcggcgccttcgcgctgaccatcatcgaggagtacgcccaggaattcggccaatacaacatcctggtctacggcctgctgctggcgctggtgatcctgttcctgcccaaaggactggtggatctgcccaacaagctcaaatccctgcgcgcgaggtaa

SEQ ID NO: 703 - protein, 309 aa, Bordetella bronchiseptica
MFRRKYGTALCALVLIALPALLNDPFITHLGVRAATYAIVVMGLTLFAGYTGQISLGHAAFFGLAAYLSGMMAKAGVPYLVSVPVATAAVGVLGCLVGMLVLRTSGHYLALASIAVAVIVQVIIKNSTITGGPSGLTAVPAPDFFGWSLTSDLGYYYYVLLCMFAGFVILRRVIDSRTGDALQAIANNELAAQSLGIPVFRYKVLSFTISTLFAAFAGTLFVHYDGFIDPDRLGIHVSVLFLIMTFVGGIGNIYGSVIGAFALTIIEEYAQEFGQYNILVYGLLLALVILFLPKGLVDLPNKLKSLRAR

SEQ ID NO: 704 - DNA, 873 bp, Bordetella bronchiseptica
  CDS (1)..(873)
atggaccattttctgcagcaactgatctacggcctgtccgtgggcagcacctatgccatgatcgccctggcgatcacgctggtgttccggggaatggacatcatcaacttcgcgcaaggcgaaatcttcatggtgggggcattcctgggctacgtcttccacgtggacctgggactgtcgatgtggctggcctttccgctggccatcgcctcggcgctggtgttcggctcgttcctcgaacggatgttcatgcggcggctggaaaacagcaaccagctctcgctgttcatgatgaccgtggcgctgttcatcctgctgcgcagcgccgcgcaactggtcttcggctcgtccgcgtaccgctttccgccgctgagcgaacatgcggcctcgatcggctcggtgcgcatcagcgaccagtacctgatcgtcatcggcatgacgctgctcatcatgctgctgctgtacctgctgttcacccgcacgccgctgggcctgtcggtgcgggcggtcgcgcaggacaagaccaccgcgcgcatgatgggcatcaacgtttcacgcatcaacaacttcaccgtggcgctgtgctcggcgctgggcgctgcggccggcatcgtctacgcgccgatagcggtgctgtcgttcgacatgggcaacctgatcatgctcaagggcttcaccgccgcgctgctgggcgggctgggcctgctctcgggcgcggtgctgggcggaatcatgctgggcgtcatcgagcagttcggcacgctgttgatcaactccgcctacaaggatctggtctcgttctcgatcctgctgctcatcatcctggtcaagcccaacggcatcctgggcaagaagcagatcaagaaagtctaa

SEQ ID NO: 705 - protein, 290 aa, Bordetella bronchiseptica
MDHFLQQLIYGLSVGSTYAMIALAITLVFRGMDIINFAQGEIFMVGAFLGYVFHVDLGLSMWLAFPLAIASALVFGSFLERMFMRRLENSNQLSLFMMTVALFILLRSAAQLVFGSSAYRFPPLSEHAASIGSVRISDQYLIVIGMTLLIMLLLYLLFTRTPLGLSVRAVAQDKTTARMMGINVSRINNFTVALCSALGAAAGIVYAPIAVLSFDMGNLIMLKGFTAALLGGLGLLSGAVLGGIMLGVIEQFGTLLINSAYKDLVSFSILLLIILVKPNGILGKKQIKKV

SEQ ID NO: 706 - DNA, 957 bp, Bordetella bronchiseptica
  CDS (1)..(957)
atgcggatatcatcgaaacactggacgctgatcgtcctggccgcgctgatcgccatcgccccgctgttcttcccctccggctattacttccgcgtgggctcgacaattttcgtcaacgcgctggcggtcaccggcatcgtcatcctgaccggctacgccggccagatcagcctgggacacgcgggattcgccggcatcggcggctatgcctgcgcgctggcgcccgtgcacctcgggctgccctcggcgctgtcggtcgtgctgggcgcggccgtctcgggcgcgctggcgtggctggtcggccgccccatcctgcgcctgaagggctactacctgggcgtggcctcgctgggcttcggcatcctggtggccatggtgctgaacaatgaacgccagctcaccaaagggccggacggcatcgccgtgcccgaccccggtctgcgcagcctgttgaagggctggggcctggacctgtccaatggccagttctggtacgccatgacgggcatcgcgctggtgatcggcgcctggctcgcgctcaacctctaccacagcccgacagggcgggcgctgcgcgcgctgcacggttcggagatcgccgccggcaccgtcggcatcgacgtggcgggcgccaagctcaaggcgtttgtcgtctcggccgtgtacgcctcggtctcgggctcgctgctggcgctgcagaaccgcttcatcacgccggacatcgcgggcttcatgcactcgatcgaaatggtgaccatggcggtgctgggcggcgtcggctcggtcgccggcgcaatcttcggcgcgagcctgctgaccctgcttccgcaggtgctgacggtgttcgccgactacgaacccctcatcctgggcctgaccatgatgctggtcatgatcttcctgcccgaaggcctggttccgtccatcatgcgcacgatacgaggaaggaaaaaatga

SEQ ID NO: 707 - protein, 318 aa, Bordetella bronchiseptica
MRISSKHWTLIVLAALIAIAPLFFPSGYYFRVGSTIFVNALAVTGIVILTGYAGQISLGHAGFAGIGGYACALAPVHLGLPSALSVVLGAAVSGALAWLVGRPILRLKGYYLGVASLGFGILVAMVLNNERQLTKGPDGIAVPDPGLRSLLKGWGLDLSNGQFWYAMTGIALVIGAWLALNLYHSPTGRALRALHGSEIAAGTVGIDVAGAKLKAFVVSAVYASVSGSLLALQNRFITPDIAGFMHSIEMVTMAVLGGVGSVAGAIFGASLLTLLPQVLTVFADYEPLILGLTMMLVMIFLPEGLVPSIMRTIRGRKK

SEQ ID NO: 708 - DNA, 1950 bp, Bordetella bronchiseptica
  CDS (1)..(1950)
atggatctgacaggttttctggcccagctgctcaacgggctggccgaggcatcgtcgctgttcctggtggcggcggggctttcgctgattttcggcgtgacgcgcatcgtcaatttcgcgcacggctcgctctacatgctgggcgtgtacgtggcgtattcgatcgtcgagcgcgtgggcggcaccgcgctgggcttctggttcggcctggtggccgcgtcgctggccgtcggcgtggtgggcgcggctatcgaggtcgtgctgttgcgccgcatctatcgcgcgccggagctgttccagctgctggcgaccttcgccctggtgctggtcatcaacgatgccgcgctgtggatctggggcgccgaagacctgctggggcggcgcgcgccggggctgaccggcgcggtcgacctgctgggccgccagtacccggtctacaacctggtgctgatcgtgatcgggccggtggtgctggggctgctctggctgctgctgacgcgcacgcgctggggcaccctggtgcgcgcggccacgcaggaccgcgagatgctcggcgcgctgggcgtgaaccaggcctggctgttcaccggcgtgttcgcgctgggcgccatgctggccgggctgggcggcgcgctgcaattgccgcgcgagccagccagcctgagcctggacctgcgcaccatcggcgacgcgttcgtcatcgtggtggtgggcggcatggggtcgatcccgggcgcctatgtggccgcgctcatcatcgccgaaatcaaggcgctgtgcatcggcctgggcaccgtgaccctgctgggcttcagcgtgtcgttctccaagctgacgctggtggtggagttcgccttcatggcgctggtgctggtgttccgcccctggggcctgttcggacgcccgcagggcgccagccgcaactcggcgcccatcgaggcgccgctgcggccggccgcgccgcgcctgcgcatcctgtggggcgtcctgctggccgccctggcgacgctgccgctgctggcgcagtggctgccgtacgcggtggtgctgacgcaggacatcctgatcgccgcgctgttcgccgtcagcctgcatttcatgatggggccgggcggcatgcattcgttcggccacgcggcgtacttcgggctgggcgcgtacggcgcggccttgctgctgaaggccgcctcgctgcccatggaggccgcgctggccttcgcgccgctggtggccgccctgggcgcgctgatcttcggctggttctgcgtgcgcctgtcgggcgtctatctggccatgctgaccctggcgttctcgcagatcgtctggtcggtggtgttccagtgggacgacttcaccggcggctccaacggcatgatcggcgtctggccggccgagtggctgtccggcaccgcctactactatctggcgctggcggtggtcgcggccgccgtgctgggcctgcggcgcgtgctgttctcgccattcggctacgcaatgcgcgccgggcgcgattccagcctgcgcgccgacgccatcggcatcgacgtcaagcgggtgcagtgggcggctttcgtggtggccggcgcgttcggcgggctggccggagcgctgtatgcgttttccaagggcagcatttcgcccgacaccatggcggtgagcaagtcggtcgacggcctggtgatggtgctgctgggcggcatccagaccctgatcggcccggtggtgggcgcgacggcgttcaacgtgctgcaggattacatcatgcgcgccaccgagtactggcgcgcgctgttcggcggcgtcatcctcctgctggtgctggtgttcccgcaagggatcgcgggattctgccggcaggcggggcaatggtggagcgcgcgcgccggcaaggaccggccgccgcgcaagggcggcgccttcatcggcggaccgcgggagaagcaggcatga

SEQ ID NO: 709 - protein, 649 aa, Bordetella bronchiseptica
MDLTGFLAQLLNGLAEASSLFLVAAGLSLIFGVTRIVNFAHGSLYMLGVYVAYSIVERVGGTALGFWFGLVAASLAVGVVGAAIEVVLLRRIYRAPELFQLLATFALVLVINDAALWIWGAEDLLGRRAPGLTGAVDLLGRQYPVYNLVLIVIGPVVLGLLWLLLTRTRWGTLVRAATQDREMLGALGVNQAWLFTGVFALGAMLAGLGGALQLPREPASLSLDLRTIGDAFVIVVVGGMGSIPGAYVAALIIAEIKALCIGLGTVTLLGFSVSFSKLTLVVEFAFMALVLVFRPWGLFGRPQGASRNSAPIEAPLRPAAPRLRILWGVLLAALATLPLLAQWLPYAVVLTQDILIAALFAVSLHFMMGPGGMHSFGHAAYFGLGAYGAALLLKAASLPMEAALAFAPLVAALGALIFGWFCVRLSGVYLAMLTLAFSQIVWSVVFQWDDFTGGSNGMIGVWPAEWLSGTAYYYLALAVVAAAVLGLRRVLFSPFGYAMRAGRDSSLRADAIGIDVKRVQWAAFVVAGAFGGLAGALYAFSKGSISPDTMAVSKSVDGLVMVLLGGIQTLIGPVVGATAFNVLQDYIMRATEYWRALFGGVILLLVLVFPQGIAGFCRQAGQWWSARAGKDRPPRKGGAFIGGPREKQA

SEQ ID NO: 710 - DNA, 876 bp, Bordetella bronchiseptica
  CDS (1)..(876)
atggatacagtgctgttcgccaatgccatcatcaatggcgtcattgtcgggttgctgctggcgttaccggccttggccattacgttggtattcggcatagcccggtttcccaacgccgccgccggcgactacatgaccttcggcgcctacgcgaccgtggccgcgcaggcgttcatgggcgcgtcgctggtcggcagcgcgatcgtggcgacgctggccaccgggctgctttccctgttcttctatttctgggtcttcaggaaactggcgcagcgctcgctggtggcgcgcctgatcgcctcgatcggcatcgccttcgccgtcagggccgccattaccttcttcgccgggcacgggcaatacaccatccaggcgccgctgcagcgggcctggaacttcggcgggatacgcatcctgccgctggatgtgtacatcctcctggccgcgctgcttgccctggccttcatgttcggcctgctttacctgtcgccgacgggccggcgcatgcgggccgtatcggacaacccgcaactggcggccgtcggcggcatcggcgtgcgcaaggtaatggtgatcctctgggggatcgtcggggtgttctcggggctgggcggcgtattgctgggcatcaaggcgacggtgctgccggaactgggctgggaactgctgctgcccatgttcgccgcggtgatcctgggcggggtcggcagtccggtcggcgccgtgctggggatgatcgtgttcggcatcgcccaggaggccgcgacgctctatatcgggtccgcctacaagattgtgatcgctttcctggtgttgctggttgtcctgctgttcaggccccagggcatcatgggccgcgtccaggcagtgaggtaa

SEQ ID NO: 711 - protein, 291 aa, Bordetella bronchiseptica
MDTVLFANAIINGVIVGLLLALPALAITLVFGIARFPNAAAGDYMTFGAYATVAAQAFMGASLVGSAIVATLATGLLSLFFYFWVFRKLAQRSLVARLIASIGIAFAVRAAITFFAGHGQYTIQAPLQRAWNFGGIRILPLDVYILLAALLALAFMFGLLYLSPTGRRMRAVSDNPQLAAVGGIGVRKVMVILWGIVGVFSGLGGVLLGIKATVLPELGWELLLPMFAAVILGGVGSPVGAVLGMIVFGIAQEAATLYIGSAYKIVIAFLVLLVVLLFRPQGIMGRVQAVR

SEQ ID NO: 712 - DNA, 888 bp, Bordetella bronchiseptica
  CDS (1)..(888)
atgaacatcgaatccattctcggcattccgatcaacgcgttcatgggccagttgctgatggggctgatgaacggcgccttctacgccatgctgagcctgggcctggcgatcattttcgggctgctcaacgtgatcaatttcctgcacggcgcccagttcatggtgggggcgttcatcgcctggatgctgctggcgtgggcgggcctgagctactgggtcgccctgctggtggcgccgctggtcgtcgcgatcggcgccgtgttcgtcgagcgcctgttcctgcggcatctctaccgtctcgaccatctctacggcatgctgctgaccttcggcctgatgctgatggtcgaggggctgtttcgcaagagcttcggctcgtccgggcttccctatcccaatgtcatccccggcggcatgaacctgggtttcatgttcctgccgtattaccgggcctgggtcgtggcggcctcgctgctcgtctgcctggccatctggctgctgatcgagaagacgcggctgggcagctatctgcgcgcggcgaccgagaacccggacatggtgcgcgccttcggcatcaaggttcccgtgctgctgacgctgacctacgcgttcggcgcggggctggccggcctggcgggcgtcatggcggcgccgatctaccaggtcagtccgctgatgggctccaacctggtcatcctggtcttcgccgtggtggtgatcggcggcatgggctcgatcctgggctcgatcctgaccggcttctcgctgggcgccatcgaaggcctgaccaaactcttctacccgcaggcctcggcgaccgtgatcttcctcgtgatgatcatcgtgctgctcatcaagccgacgggcctgttcggcaaggcgaagtga

SEQ ID NO: 713 - protein, 295 aa, Bordetella bronchiseptica
MNIESILGIPINAFMGQLLMGLMNGAFYAMLSLGLAIIFGLLNVINFLHGAQFMVGAFIAWMLLAWAGLSYWVALLVAPLVVAIGAVFVERLFLRHLYRLDHLYGMLLTFGLMLMVEGLFRKSFGSSGLPYPNVIPGGMNLGFMFLPYYRAWVVAASLLVCLAIWLLIEKTRLGSYLRAATENPDMVRAFGIKVPVLLTLTYAFGAGLAGLAGVMAAPIYQVSPLMGSNLVILVFAVVVIGGMGSILGSILTGFSLGAIEGLTKLFYPQASATVIFLVMIIVLLIKPTGLFGKAK

SEQ ID NO: 714 - DNA, 867 bp, Bordetella bronchiseptica
  CDS (1)..(867)
atgttgatgcaaatcctgatcggctcgctcacggccggcgcggtctacgcgctggtcgcgctcgggttcgtgctgatctacaagggcaccggcgtggtgcacttcggctacggcgagcagctgaccttcggcgcctacatggcgctgatcggccagtcgctgctggggctgccgttcggcctggcgctgctgttcgcgctggcggcctcggcgctgctgggctggctgatcttcggcctgttcgccgggccgctgcgccacgccacgctgtggacccgcatcatcgccaccctggccatcggcatcgcgctgcgcgaggggctgcgggcctacatggggccgacggcctggccgttcccgttcctgctgtcgcagcaggccttcgaggtgggcggcatttacctggtgcccgccaacctcgcgatcgccggcatcgcggtgctcatcctggcggccctgttcctgttcctggagcgcaccctgcgcggcaaggcgatcctgtcggcgtgcgagaaccgcaccggcgccagcctggtcggcatccgcgtctcgcgcgtgtacctgaccatctggatcctggcctcgctgctggcggcggtggccggcatcctgatcgcgccgcagctcacgctctcgcccgacatgggcatcatcgccatcaagggcttcacggcggcggtcatcggcggctttgccagcctgcccggcgcggtgctgggcgggctgctgctgggcgtgctcgaaggcctggccggcgcgtacgtgtccagcgccatgaaggacgtcatcagctacgccgtgctcatcctggtgatgctgctgatgccgcacgggctgtttggaaaactcatcgtcaaaaaggtgtag

SEQ ID NO: 715 - protein, 288 aa, Bordetella bronchiseptica
MLMQILIGSLTAGAVYALVALGFVLIYKGTGVVHFGYGEQLTFGAYMALIGQSLLGLPFGLALLFALAASALLGWLIFGLFAGPLRHATLWTRIIATLAIGIALREGLRAYMGPTAWPFPFLLSQQAFEVGGIYLVPANLAIAGIAVLILAALFLFLERTLRGKAILSACENRTGASLVGIRVSRVYLTIWILASLLAAVAGILIAPQLTLSPDMGIIAIKGFTAAVIGGFASLPGAVLGGLLLGVLEGLAGAYVSSAMKDVISYAVLILVMLLMPHGLFGKLIVKKV

SEQ ID NO: 716 - DNA, 873 bp, Bordetella bronchiseptica
  CDS (1)..(873)
atgaatctactgcaacagctcatcaacggcatcgtgctgggccatgcctacgcgctgatcgccatcggctggaccctgctgctgggcgtggcccggctggtgaacttcggccatggccagatgtacatggtgggcgccttcgtcacctggtgggccaccacctcggccggcatgccctacctgctggcgctgcccaccgccatggcgctgggcgcgctgatcggcctggccatgcagcgcatcatgctgcgcgccaccttcgagcagaacctggtgtccatcatgatcatgacgctgggcttcggctacgtcatccagggcgcggcctcgctgatcttcggctcgaccgggcagatcctggacaccgcctggtcgcagcgcgatatcgaggtcggcgaactgtgggtcacctggcaggacgccgccatcgtggtcgccgcgatcgccgtgttcgccggcctgaagtggctgctggaaggctcgcgcgccggacgcctggtgcgcatggtggccgaagacccgaagctggcgcagctggccggcgtcgacgtgcgccgcatctactatggcgtattcgccttcgagggcgccgcggtggcgtttgccgccggcatggtggcgccgcgcacgcccatcctcacctcgatgggcttcgaggaagtcatcatcaccttcgtcgtggtggtgctgggcggcatcggcagcgtcaccggcagctatgccgccggcgtggcgctgggcgtgttcaccgccctgttcagcgccctggtctcgccggcctacgccacggcggccgccttcctggtgctgatcggcgtgctggtcttgcgcccgggcggcctgagcgccggcgcggcgcggggggtgcactga

SEQ ID NO: 717 - protein, 290 aa, Bordetella bronchiseptica
MNLLQQLINGIVLGHAYALIAIGWTLLLGVARLVNFGHGQMYMVGAFVTWWATTSAGMPYLLALPTAMALGALIGLAMQRIMLRATFEQNLVSIMIMTLGFGYVIQGAASLIFGSTGQILDTAWSQRDIEVGELWVTWQDAAIVVAAIAVFAGLKWLLEGSRAGRLVRMVAEDPKLAQLAGVDVRRIYYGVFAFEGAAVAFAAGMVAPRTPILTSMGFEEVIITFVVVVLGGIGSVTGSYAAGVALGVFTALFSALVSPAYATAAAFLVLIGVLVLRPGGLSAGAARGVH

SEQ ID NO: 718 - DNA, 930 bp, Bordetella bronchiseptica
  CDS (1)..(930)
atgggattcttcctcgaaacattgttcggcggcctgatgagcggcatgctgtacgcgctgatcggcctgggcttcgtgctgatcttcaaggcctcgggcgtgttcaacttcgcccagggcgccatggtgctggtggccgcgctgtcgatggcgcggttctccgaatggattccgcagtggctgggcttcgagaacatgctgctggccaacgtgctggccttcatcgtcagcgcgctggtcatgttcgtgctggcggtcgcggtcgagcgcttcgtgctgcgccacctggtcaaccaggaagccaccacgctgctgatggccacgctgggcatcagctactttctcgacggcctggggcagatcgccttcggcagctcggtctactcgatcaacgtcggcatgcccaaggatccggccatcatcctcgaaacgatgttcgagggcggcctgctgatcaacctggaagacctgaccgccgccgtggtggcggccctgctggtggccgcgctggcgctgttcttccagtacacctcgaccggccgcgccctgcgcgcggtggccgacgaccaccaggcggcccagtccatcggcatcccgctcaaccgcatctgggtcattgtctggagcgtggcgggcctggtcgcgctggtggccggcatcatctggggttcgaagttcggcgtgcagttcaccctgtcgaccgccgcgctgcgcgcgctgccggtggtgatcctgggcgggctgacctcggtgcccggcgccatcctgggcggcctgatcatcggggtgggcgagaagatgtcggaggtgtacctggggtcgctcgtgggcggcggcatcgaaatctggttcgcctatgtgttggcgctggtgttcctgctgttccgtccgcaagggctgttcggcgagaagatcatcgaccgggtctga

SEQ ID NO: 719 - protein, 309 aa, Bordetella bronchiseptica
MGFFLETLFGGLMSGMLYALIGLGFVLIFKASGVFNFAQGAMVLVAALSMARFSEWIPQWLGFENMLLANVLAFIVSALVMFVLAVAVERFVLRHLVNQEATTLLMATLGISYFLDGLGQIAFGSSVYSINVGMPKDPAIILETMFEGGLLINLEDLTAAVVAALLVAALALFFQYTSTGRALRAVADDHQAAQSIGIPLNRIWVIVWSVAGLVALVAGIIWGSKFGVQFTLSTAALRALPVVILGGLTSVPGAILGGLIIGVGEKMSEVYLGSLVGGGIEIWFAYVLALVFLLFRPQGLFGEKIIDRV

SEQ ID NO: 720 - DNA, 942 bp, Rhizobium leguminosarum
  CDS (1)..(942)
atgcagcgtgtttcgctcgcatccaggggaaaacgacatatggagtatttcgtccagcagctcttaaatgggctgacgctcggatccatctatggccttgtggctattggctatacgatggtttacggcattatcggcatgatcaatttcgcccatggcgacatcttcatgctcggtggtttcgccgctcttatcgtcttcttcgtcctcacatccatcttcgcaggtctcccggtggcagttctgctgctggcgatgcttgtcgtcgcgatgttgatgacgagcttgtggaactggacgattgagcgcgtcgcataccgtcccctgcgcggttccttccgcctggcgccgctgatcaccgcgatcggcatgtcgatcacgctgtccaatttcatccaggtgacgcagggtccacgcaacaagccgattccgccgatggtgagctcggtctaccagttcggcaacatttcggtgtcgctgaaacagatcatcatcatcgtgatcacggcagtgctgctcacgatcttctggtacatcgtcaatcgtaccgcactcggccgtgcccagcgcgccactgagcaggatcgcaagatggcagcgctgctcggcgtcaacgtcgaccagacgatctcgatcactttcgttatgggtgcggcactcgcagccgtcgccggcacgatgtacctgatgtattatggcgtcgcctcgtttaacgacggcttcacgcccggtgtgaaggccttcacggcagccgttctcggcggtatcggttcgttacccggcgccgtcttcggcggcctccttatcggccttatcgagtcgctgtggtcggcatacttcaccatcgcctataaggacgtcgcgacctttgcgatcctggctttcgtgttgatcttcaagccgaccggcatcctcgggcggccggaagtcgagaaggtataa

SEQ ID NO: 721 - protein, 313 aa, Rhizobium leguminosarum
MQRVSLASRGKRHMEYFVQQLLNGLTLGSIYGLVAIGYTMVYGIIGMINFAHGDIFMLGGFAALIVFFVLTSIFAGLPVAVLLLAMLVVAMLMTSLWNWTIERVAYRPLRGSFRLAPLITAIGMSITLSNFIQVTQGPRNKPIPPMVSSVYQFGNISVSLKQIIIIVITAVLLTIFWYIVNRTALGRAQRATEQDRKMAALLGVNVDQTISITFVMGAALAAVAGTMYLMYYGVASFNDGFTPGVKAFTAAVLGGIGSLPGAVFGGLLIGLIESLWSAYFTIAYKDVATFAILAFVLIFKPTGILGRPEVEKV

SEQ ID NO: 722 - DNA, 861 bp, Bacillus cereus
  CDS (1)..(861)
atggatgtgttaatcaatttatttgtaaatgggatttcaacagggatgctcatttttttgttagcatcaggtctttcacttatttttggtttaatgagcgttttaaactttgcacacggtggtttgtttgcatggggagcatttacaggtgtttggttatttaatatgacaggaagttatatattagctttagttggagcagtagccatgggaatgttcctaggatttattttagaaaggtttcttattaggccggtatatggaaatcatgttcgacagctgctcgttacgcttggaggaatgctcgttcttagtgagtgtattaaaatattttgggggccaaaccctattagtgcaaaattaccgttatggttacaaggaagttttacattcggaggtattatattaattaaatatcgtctatttgttattttgattgggataattatttacattgcactactactattactcaaaaagacgaagataggtcttatgatccgtgcaggtgtaatggataaagaaatggttcaagcgcttggtattaatgtaaaagcgatattttctttcgtctttttattaggggcagggatggcagctttgggaggattcttattagcgccgtattcgggcgttattttcgccgagatgggcatgcagtatgcaattttagcttttatagtagtaattatcggtggattaggaagcgttcaaggttcagctattgcttctttaattgtcggattagctggtgcttttacagcgtattttataccagatttatcacttgcaattaatatgttaatgttactatttttcttaatagtgaagccaactggacttgttggtgaaaaggggtga

SEQ ID NO: 723 - protein, 286 aa, Bacillus cereus
MDVLINLFVNGISTGMLIFLLASGLSLIFGLMSVLNFAHGGLFAWGAFTGVWLFNMTGSYILALVGAVAMGMFLGFILERFLIRPVYGNHVRQLLVTLGGMLVLSECIKIFWGPNPISAKLPLWLQGSFTFGGIILIKYRLFVILIGIIIYIALLLLLKKTKIGLMIRAGVMDKEMVQALGINVKAIFSFVFLLGAGMAALGGFLLAPYSGVIFAEMGMQYAILAFIVVIIGGLGSVQGSAIASLIVGLAGAFTAYFIPDLSLAINMLMLLFFLIVKPTGLVGEKG

SEQ ID NO: 724 - DNA, 933 bp, Streptomyces avermitilis
  CDS (1)..(933)
atgcacaccctgccgcagcagctggccaacgggctgttcctcggctcgatgtacgggctgatcgccatcggttacacgatggtgtacggcatcgtccagctcatcaacttcgcccacggcgagatcttcatgaccggaggcttcggcgcactcacggtctacttctacgtcctgccagacggcacatccatgtggatagccctcccggcgatgctcatcggaggcggcctcatcgccgtactcatcgccgtcggggcggaacgcttcgcctaccggcccctgcgcggcgcaccacgcctcgcccccctcatcaccgccatcggcctctccctcggcctccagcaggtggtcttcaacttctacccggacgccaagaccgacaggaccttcccccagctgggcaccgagtccttcaacatcggctccgtccacatccagagcggccagctcttcatcatcatcgccgcccccatctgtatggccgctctcggcttcttcgtccgcctctcccgcaccggccgcgccatgcaggccaccgcccaggacccggacaccgcccagctcatgggcatcgacaccaaccgcatcatcgtcatcgccttcgccatcggcggactcttcgccgcggtcgccgccgtcgcctacggcctgcgctacggccagatcaagtacgacatgggcttccagatgggcctcaaggccttcaccgcggccgtcctcggcggcatcggcaacatctacggcgccatgctcggcggagtcgtcctcggcgtcgccgaaaccctcgccaccgcctacatcgacggcatccccggcatgcagcagctcggcggcggcagctgggcccccgtctgggccttcgtcctcctcatcctcgtactgctgctgcggccacaaggcctcctcggcgaacgcgtcgcggacagggcgtga

SEQ ID NO: 725 - protein, 310 aa, Streptomyces avermitilis
MHTLPQQLANGLFLGSMYGLIAIGYTMVYGIVQLINFAHGEIFMTGGFGALTVYFYVLPDGTSMWIALPAMLIGGGLIAVLIAVGAERFAYRPLRGAPRLAPLITAIGLSLGLQQVVFNFYPDAKTDRTFPQLGTESFNIGSVHIQSGQLFIIIAAPICMAALGFFVRLSRTGRAMQATAQDPDTAQLMGIDTNRIIVIAFAIGGLFAAVAAVAYGLRYGQIKYDMGFQMGLKAFTAAVLGGIGNIYGAMLGGVVLGVAETLATAYIDGIPGMQQLGGGSWAPVWAFVLLILVLLLRPQGLLGERVADRA

SEQ ID NO: 726 - DNA, 891 bp, Streptomyces avermitilis
  CDS (1)..(891)
atgagcaccgccctggacaccgtactgaacgggctcgccctcggttcggtctacgccctggtcgccctcggcttcgtcatcatcttcaaggcctcggcagtgatgaacttcgcgcacggctccctgctgctcctcggcggctatctgaccgcggtgctgcacgaccggctcggcttcgcgggcgccctcgccctcgcggtcctcgccaccgcggccgccgccgggctgatcgactggctgctgctgcgccgcctcgacccgcacgccgcgcacgtactgaccatcctcaccatcggcgtcgacatcctgctgatgacggacctcacccgccgcatcggcggggacctcctcaccctgggcgacccctggggctccgacgtgaccgagctcggcccgatcaccgtcgccgacagccggatcgcctcgatcctggtgtcactggtcgtcatcgccgccgtcttcgccgtcttccggttcacttcgtggggcctgtccctgcgagccgccgccgaggaccacgaggccgccgcgctgatgggcatcaggctcgcccggatccggaccctcgcctggtgcctggccggcgcgctcgccgcgctcgccgccgtcttcctggccgccttcccggcccccggcctggagcgcaccaccggacagatcgcgctgaaggccttccccgccgcgatcctcggcggcatggcctcgccgccgggcgcgctcgccggaagcctgctgatcggcgtcaccgaggcgctggcggccggctaccagtccgaactctccgcgctcggcgagggcttcggcgacgtggtgccgtacgccgtgatggtgctggtgctcctcgtccggcccgccggtctcttcgggacgagggaggcggcccgtgtctag

SEQ ID NO: 727 - protein, 296 aa, Streptomyces avermitilis
MSTALDTVLNGLALGSVYALVALGFVIIFKASAVMNFAHGSLLLLGGYLTAVLHDRLGFAGALALAVLATAAAAGLIDWLLLRRLDPHAAHVLTILTIGVDILLMTDLTRRIGGDLLTLGDPWGSDVTELGPITVADSRIASILVSLVVIAAVFAVFRFTSWGLSLRAAAEDHEAAALMGIRLARIRTLAWCLAGALAALAAVFLAAFPAPGLERTTGQIALKAFPAAILGGMASPPGALAGSLLIGVTEALAAGYQSELSALGEGFGDVVPYAVMVLVLLVRPAGLFGTREAARV

SEQ ID NO: 728 - DNA, 897 bp, Streptomyces avermitilis
  CDS (1)..(897)
atgaccgtcatcttcggtcagaccttcaccggcatcagcatcggtgccgttctgctgctcatcgcgctcggcctctcgctcaccttcggtcagatgaacgtcatcaacatggcccacggcgagttcatcatggccggcgcctacaccacatacgtcctgcagaagtccatttccagcgccggattgtcgcttctggtcgcgctgcccgtcgcatttctcgtctcgggcgcactcggggcgttgctggaatggctgctgatccgccggctgtatctgcggccgctcgacacacttctcgtcacctggggcgtctccctgatgctccagcaactcgcccgggacatcttcggcgcaccgaatgtgcagacacgggcgcccgagctcctcaccgggaacatcacggtcatcggcggtgacgacccgctcaccttcgccaacagccggctgttcatcctcgggctggccatcgccgcggtggtcgcgctgtcgctgacgctgcggctgaccccgctcggccggcgcatccgggccgtggtgcagaaccgggatctggccgaggtgtccggcatctccaccggccgggtcgatcgcacggccttcttcatcggctccgggctcgccggggtcgccggggtcgcgctgacgctggtcggtccgatcgggcccaccatgggcaccaacgtgatcatcgacgccttcctggtgatcgtggtcggcggcatcgggcagctcaagggcagtgtgatcgtcgccttcgtgctcggcgtgctccagtcggtcctcgagtactcgaccacggtcagcgtcgcgaaggtgctggtgctggtcgccatcgtcgctttcctccagtggcggccccaggggctgtacaccctgcgcacgaggagtctcgtatga

SEQ ID NO: 729 - protein, 298 aa, Streptomyces avermitilis
MTVIFGQTFTGISIGAVLLLIALGLSLTFGQMNVINMAHGEFIMAGAYTTYVLQKSISSAGLSLLVALPVAFLVSGALGALLEWLLIRRLYLRPLDTLLVTWGVSLMLQQLARDIFGAPNVQTRAPELLTGNITVIGGDDPLTFANSRLFILGLAIAAVVALSLTLRLTPLGRRIRAVVQNRDLAEVSGISTGRVDRTAFFIGSGLAGVAGVALTLVGPIGPTMGTNVIIDAFLVIVVGGIGQLKGSVIVAFVLGVLQSVLEYSTTVSVAKVLVLVAIVAFLQWRPQGLYTLRTRSLV

SEQ ID NO: 730 - DNA, 1005 bp, Tropheryma whipplei
  CDS (1)..(1005)
atgttgcttagtttggattatcttttgagtcagtcgtggatcacgtttgatgtggcttccttcatcaagggctttggctttgctacggttgaaggcctgactttcggtgccatctatgcactgattgccgttggctataccgtggtgtacggtgttttggggcttatcaatttcgctcatgctggggtttttgttaccggctgctacgcccttgtatttacgctctctgcgcttggttttagctcttttccttctaagaagcccatttttattgttcttatttacgtcctcatcgcggtgtttgtttccattcttgctgctgccgctgttgcctttcttgttgagcgcgttgcctataagcctcttaggaagagaaatgcccctaatctggcatttctaattactgcaataggtgcttccctgaccataagtaatttattttttcttcgttccccaaatccagagcctgcactttctatttttaccccagtccctctttttaaattttttggtgcaactgttacaagctttaatgtggtgacaattctggctgcggtaatcctgatgtttttggttgactggttcataaggcggaccagatttggcaggggcattagagctgtggcgcaggatcctaacactgcttcacttgttggagtgaaccccgagcgggttatagcgctgacttttgttcttggtggtgttatagctggcgctgcaagtctgttctatgttctaaaggttccttcgggtgttgtgtacaatgcggatattgttctcggtttaaaggcttttgctgctgccgttctgggtggcattggcagcattcggggcgctctactcggagggcttctgctcggtctgttctctaactggggtgctctgcttttgggtaatagccagtggggtgatgtttctgtctttgttcttctgttactagttttacttttcaggccatctggtatcctcggcagatctggcctttcggctaaaagcaggatgtga

SEQ ID NO: 731 - protein, 334 aa, Tropheryma whipplei
MLLSLDYLLSQSWITFDVASFIKGFGFATVEGLTFGAIYALIAVGYTVVYGVLGLINFAHAGVFVTGCYALVFTLSALGFSSFPSKKPIFIVLIYVLIAVFVSILAAAAVAFLVERVAYKPLRKRNAPNLAFLITAIGASLTISNLFFLRSPNPEPALSIFTPVPLFKFFGATVTSFNVVTILAAVILMFLVDWFIRRTRFGRGIRAVAQDPNTASLVGVNPERVIALTFVLGGVIAGAASLFYVLKVPSGVVYNADIVLGLKAFAAAVLGGIGSIRGALLGGLLLGLFSNWGALLLGNSQWGDVSVFVLLLLVLLFRPSGILGRSGLSAKSRM

SEQ ID NO: 732 - DNA, 918 bp, Pseudomonas fluorescens
  CDS (1)..(918)
atgagtaccttagtgattgaggaggccctgaacggattgcagttcgggctcatgcttttcttgctcgcggcgggattaactctggtgtttgggatcatggatatgatcaacctggcccatggctcgctgtacatgattggtgcatacctgaccgccaccgtcgctgaggccagtggctcttacttcattggcattcccgttgcgctggtaggaacagcgatcattggcatggtgctggagataagcctgtttcgaaggttgtatagaagggatcacttatctcaagtgctggcgacctttgcactgatcctcatctgtaacgaggcggtgcgaatgatctggggtgtacaacccattccgctcagcacaccggccgtgttctcgcgcccgattgagctgatccctggtctgcactattccgcacagcggttgatgattatcggtgtggggctggtggtcgcgatctcaatgtacttcctggtagcgaaaacccgattgggtatgtgggttcgggcaggagcatccaatcgggaaatggccaccacgatgggcgtgaacatcaaatggttgttcaccgtggtgttcggtgtaggggcagcgctgtgcgccttggctggtgcaatgcttggtccattgctggcagtacaagttggcatgggcgaaagcattctgattctggcgtttgtggtagtcgtcatcggtggcatcggctccatcaggggggcgtttgtcggtgcgcttctgatcggcgccgtcgacaccttgagccgttcactgcttcctctgttgctcggcaagttcctatcgccatcagtgacctcctcgattggcgcagccgtggcatcaatcatcatttacgttcttatggctgccgtgctgttttggaagccacaaggcctgtttcctgctcgtgggtga

SEQ ID NO: 733 - protein, 305 aa, Pseudomonas fluorescens
MSTLVIEEALNGLQFGLMLFLLAAGLTLVFGIMDMINLAHGSLYMIGAYLTATVAEASGSYFIGIPVALVGTAIIGMVLEISLFRRLYRRDHLSQVLATFALILICNEAVRMIWGVQPIPLSTPAVFSRPIELIPGLHYSAQRLMIIGVGLVVAISMYFLVAKTRLGMWVRAGASNREMATTMGVNIKWLFTVVFGVGAALCALAGAMLGPLLAVQVGMGESILILAFVVVVIGGIGSIRGAFVGALLIGAVDTLSRSLLPLLLGKFLSPSVTSSIGAAVASIIIYVLMAAVLFWKPQGLFPARG

SEQ ID NO: 734 - DNA, 867 bp, Azoarcus evansii
  CDS (1)..(867)
atggatttcgtatccttcctgatccaggtgctgaactcgctgcagtacggcctgctgctgttcctcgtggccagcgggctgacgctggtgttcggcatcatgggcatcatcaacctcgcgcacggcagcttctacatggtcggcgcctacctcgcgttcgcgctcacgagcctgaccggcaacctgatgctggcgatcgcgctggggttgccgctggccttcgtgttcggcgcgatcctcgaatgggcgctgttctcgcacctgtacaagcgcgaccacctcgaacaggtgctgctgacctacggcctgatcctgatcttcgaggagctgcgcagcctcgccgtcggcgacgacgtgcatggcgtgacgatccccgagctgttctcggcatcgatcccgctctcggataacctcagctacccgctgtatcggctggtgatctcggtcgtgtgcctcgcgctcgcgggcgggctgtactggctgatccagaagacgcgcctcggcatgatgatccgcgccggcagccacgaccgcgacatggtcaaggcgctcggcatcgacatcaacctgctgtaccgcaccgtgtttgccctcggtgtcgcgctcgcggcgctggccggcatgctcgccgcgccgatctcctccgtctatccgggcatgggcagcagcgtgctgatcatctccttcgtgatcgtcgtgatcggcggcgtcggctcggtgtggggcgcgctcgtcgcggcgctcgtgatcggcttcgcggacaccttcggcaaggtgctgctgcccgatctcgcgggcctgatggtctatctcgtgatggccgtggtgctgctgtggcgccccgaaggcatcttcaagaaggcttga

SEQ ID NO: 735 - protein, 288 aa, Azoarcus evansii
MDFVSFLIQVLNSLQYGLLLFLVASGLTLVFGIMGIINLAHGSFYMVGAYLAFALTSLTGNLMLAIALGLPLAFVFGAILEWALFSHLYKRDHLEQVLLTYGLILIFEELRSLAVGDDVHGVTIPELFSASIPLSDNLSYPLYRLVISVVCLALAGGLYWLIQKTRLGMMIRAGSHDRDMVKALGIDINLLYRTVFALGVALAALAGMLAAPISSVYPGMGSSVLIISFVIVVIGGVGSVWGALVAALVIGFADTFGKVLLPDLAGLMVYLVMAVVLLWRPEGIFKKA

SEQ ID NO: 736 - DNA, 894 bp, Vibrio parahaemolyticus
  CDS (1)..(894)
atgaatacggatttattactgcaactcgtcattaatggcgtgatcgtcggcatgttgtatggcgtggtcgccatgtgctttgtactgatttacaaatcaactcaggtggtgaactttgctcagggtgagtttctactgatcggcgcgtgggtgtgttgggctgcattggttcatctacaactgccatttttcgtcggcttcttactcacgctcgcctttatgatggtgtttggtatcgccgtgcaaaccattgtgctcaggcctttaattggtgagccgatcatctcggtgatcatggtgacgattggtttgtcgatgttcttccaagcactgatgaagtggatgtttggtgtgtcagcggtgtcgtacccgcaggtattcgaaaccaacgtcgtcaatattggtggtttgaacgtagaatttgcttacatactgagcttgatcttctcgatgatcatcatgggcgcgttctactggttctttaaattcagcaaaatgggcttggcgatgcgtgcgaccgcatttaaccagcaggtcgcccagagtcttggcatttccatcaagaaagtgtttgcgatcagttgggctatttcggcgatggtatccgcgacagcagggattgttatcgggatcgtcaacggcgtatcggacgcgctatctatcatcggcatcaaagtgttcccagcggttattttaggtggcttggattcagtggtcggcgcaatcgtcggtggcatcaccatcggggtgctggaaaacttagctgagttctttgatagccaatacctgcaagtgggtaacctttacaacatcgcaccgttctatgtgctgttaatcattcttgccttcaagccatacggcctgtttggtaccaaagatattgagcgtatttaa

SEQ ID NO: 737 - protein, 297 aa, Vibrio parahaemolyticus
MNTDLLLQLVINGVIVGMLYGVVAMCFVLIYKSTQVVNFAQGEFLLIGAWVCWAALVHLQLPFFVGFLLTLAFMMVFGIAVQTIVLRPLIGEPIISVIMVTIGLSMFFQALMKWMFGVSAVSYPQVFETNVVNIGGLNVEFAYILSLIFSMIIMGAFYWFFKFSKMGLAMRATAFNQQVAQSLGISIKKVFAISWAISAMVSATAGIVIGIVNGVSDALSIIGIKVFPAVILGGLDSVVGAIVGGITIGVLENLAEFFDSQYLQVGNLYNIAPFYVLLIILAFKPYGLFGTKDIERI

SEQ ID NO: 738 - DNA, 1314 bp, Pseudomonas syringae
  CDS (1)..(1314)
atgtccgttactgctgctggtcctgtcaccaaacctgttgaaatcaaaaaaagcctgatcgatgccgtcgtcgccgggctgctggcgctgatcgtatttggcccgattgtcggcatcgtgctcgacggctacagcttcaacctgcaaccgacccgtgtcgcgtggctggtggctgtggtcatggtcgggcgctttctgattagtctgttcctgcagacgcccaggggcatacgcatgtcccagagctttgaaagctcggattctggcgtgcatgtgctcaagccagatcacaaatccagcctgtactggatcattccgctgctgatcgtggttgccatcgtgttcccgatcttcgccaacaagtacatcctgaccgtggtcattctcgggctgatctacgtactgctggggctgggcctgaacatcgtggtcggtctggccggtctgctcgatctgggctacgtcgcgttctacgccatcggtgcttatggcctggcgctcggctatcagtatctgggcctgggtttttggtcggcgttgccgctggcagcgatcgcggcggcgcttgccgggtgcattctcggctttccggtgttgcgcatgcatggcgattacctggccatcgtgacgctggggttcggcgaaatcatccgtctggtgctgaacaactggctatcgttcacgggcggcccgaatggtgtgccggtgccgtcgccgacctttttcggcctggaattcggacgtcgcgccaaagacggcggtgtccccattcatgaatatttcggcttcgattacaacccggacctgaaattcatcttcatctataccgtgctgtttctggtggtgctggcagtgctgttcatcaagcatcgcctgacccgcatgccgatcggtcgtgcctgggaagccttgcgtgaagacgagattgcctgccgttcgatgggcctcaatcacgtactggtcaagctctcggcgttcaccataggtgcttcgacagcggggcttgcgggcgtgtttttcgccagctaccaaggcttcgtcaacccgacgtcgttcaccttcttcgagtcggcgctgattctggccatcgtcgtgctgggcggtatgggttcgaccatcggtgtggtgattgctgcgttcgtgctcaccgttgcgcctgaactgctgcgcagcttctctgagtaccgcgtgttgctgttcggcattctgatggtgctgatgatgatctggcggccgcgcggcctgatccgcatcagccgcaccggggtgaaaccacgcaagggtgcgctggtgacagaaggaggtgcgcgatga

SEQ ID NO: 739 - protein, 437 aa, Pseudomonas syringae
MSVTAAGPVTKPVEIKKSLIDAVVAGLLALIVFGPIVGIVLDGYSFNLQPTRVAWLVAVVMVGRFLISLFLQTPRGIRMSQSFESSDSGVHVLKPDHKSSLYWIIPLLIVVAIVFPIFANKYILTVVILGLIYVLLGLGLNIVVGLAGLLDLGYVAFYAIGAYGLALGYQYLGLGFWSALPLAAIAAALAGCILGFPVLRMHGDYLAIVTLGFGEIIRLVLNNWLSFTGGPNGVPVPSPTFFGLEFGRRAKDGGVPIHEYFGFDYNPDLKFIFIYTVLFLVVLAVLFIKHRLTRMPIGRAWEALREDEIACRSMGLNHVLVKLSAFTIGASTAGLAGVFFASYQGFVNPTSFTFFESALILAIVVLGGMGSTIGVVIAAFVLTVAPELLRSFSEYRVLLFGILMVLMMIWRPRGLIRISRTGVKPRKGALVTEGGAR

SEQ ID NO: 740 - DNA, 1590 bp, Pseudomonas syringae
  CDS (1)..(1590)
atgccttcttatttttaccgtttgatcctcgccatcagcctgctgctgcccttcgcagcgcaggccagcgatgccggtgattttgccgcagccagttcttcccgacaggccgagctgttggaggcctgggcagccagcccggtccctgaacgcatcgaactgctggaagcgctgcgcgatggccgtgttgccgccgacagtagcaaacgcgcgtggatcgaaaacaacgacaaatacggggcagtggatgcgaatgcgcctgcggctgccgacgctccaacccctgacgaaccgcgcaaattgcgcctgaacaaccggctgcgcggcctggtcgataccgcgctggccagccaccaattgctggcagccgacaccaggctgcgtcttgcggcagctttgcaattgcaaaaaagcgcccgccccgcgcaactggatctgctgacccagcgcgtggccagcgaaaccgattccagcgttaaaagcgcgctgacactggcgctggccaacctgcaactggtcgattccagcccctcggtgcgtctggcggcagtgcgcctgctcggcgaaaccggcgacccgctggcgcgtacccgtcttgagtcgctgctggcgccgggcgtcgaaaccgatgcgtcagtgcgcattgccgctgaaaccagcctggcgcaggtcaaccgcaagctgatgatcggcgaagtgctcggtcaggcgttcagcggcatgtcgctgggctcgattctgttgttggcggcgctggggctggcaatcaccttcggcctgctcggcgtgatcaacatggcccacggcgaaatgctgatgctgggtgcctactcgacctacgtggtgcaactgatgctgcagcgctacgcgccgggtgccatcgagtactacccgctgatcgcattgcccgtggcgttttttgtcaccgccatgatcggcatggtgctggagcgcacggtgattcgtcatttgtacggccgcccgctggaaaccctgctcgccacctggggcatcagcctgatgctgatccaggccgtgcgcctggccttcggtgcgcaaaacgtcgaagtggccaacccgcaatggttgtccggcgggattcaggtgctgcccaatctggtgctgccttacaaccgcatcgtgatcatcgccttcgcgctgttcgtggtgctgctgacctggctgctactgaacaagacccgcctggggctgaacgtgcgcgccgtgacccagaaccgcaacatggccgcctgctgcggcgtgccgaccgggcgcatcgacatgatggcgttcgggctgggctcaggcattgcaggcctgggcggcgtcgccctgagccagatcggcaacgtcggccctgatctcggccagagctacatcatcgactcgttcctggtggtggtgctcggtggcgtcggacaactggccggcagcgtgacggcggctttcgggctgggtatcgccaacaagattctcgaaccgcaaatcggcgccgtattgggcaagatcctgatcctggcgctgatcattctgtttatccagaaacgtccgcaaggcctcttcgcactgaaaggacgggtgattgactga

SEQ ID NO: 741 - protein, 529 aa, Pseudomonas syringae
MPSYFYRLILAISLLLPFAAQASDAGDFAAASSSRQAELLEAWAASPVPERIELLEALRDGRVAADSSKRAWIENNDKYGAVDANAPAAADAPTPDEPRKLRLNNRLRGLVDTALASHQLLAADTRLRLAAALQLQKSARPAQLDLLTQRVASETDSSVKSALTLALANLQLVDSSPSVRLAAVRLLGETGDPLARTRLESLLAPGVETDASVRIAAETSLAQVNRKLMIGEVLGQAFSGMSLGSILLLAALGLAITFGLLGVINMAHGEMLMLGAYSTYVVQLMLQRYAPGAIEYYPLIALPVAFFVTAMIGMVLERTVIRHLYGRPLETLLATWGISLMLIQAVRLAFGAQNVEVANPQWLSGGIQVLPNLVLPYNRIVIIAFALFVVLLTWLLLNKTRLGLNVRAVTQNRNMAACCGVPTGRIDMMAFGLGSGIAGLGGVALSQIGNVGPDLGQSYIIDSFLVVVLGGVGQLAGSVTAAFGLGIANKILEPQIGAVLGKILILALIILFIQKRPQGLFALKGRVID

SEQ ID NO: 742 - DNA, 1266 bp, Pseudomonas syringae
  CDS (1)..(1266)
atgagcaagtctttcaaacaggcgctgttcagcgccgcactggtctgggccgtggcctacccggtgttcggcctgaaactggcgttctccggcgtgaccctgcaagtgcagaatgccagcccgctgaccctgaccattattgccgtgtgctcggtgctgctgtttctgcgcgtgctgttcgccgagcaaatcagcagcctgcgtcgcggctcggaaaagccgctgatcccgcagaagaccagcgacttcctgactcagccgaaaacccagcgctggggcctggcggccctgatcgtgctggccttcatctggccgttcttcggctcgcgcggtgcggtggacatcgccacgctgatcctgatctacgtcatgctcggcctgggcctgaacatcgtcgtcggcctggccggcctgctcgatctcggctacgtgggtttctatgcggtcggtgcctacagctacgccctgctgtcccattactacgggctcggcttctggatctgcctgccgattgcggggatgatggcggcagtgttcggcttcttgctgggcttcccggtattgcgtttgcgcggcgactatctggccatcgtgacgctggggttcggcgagatcatccgtattttcctgcgtaacctcaccgagttgacgggtggcccgaatggcatcagcaacatcgacaagccgacctttttcggcctgacgttcgagcgcaaagcggccgaaggtatgcagacctttcacgagtatttcggcctgccgtacaactcgatcaacaaggttgtctttctctacctgatcgccctgctgctggcactggcggcgctgttcgtcatcaaccgtctgctgcgcatgccgatcggccgggcctgggaggcgctgcgtgaagacgaaatcgcctgccgcgcgctgggcctgaatccgaccgtcatcaagctgtcggccttcaccctgggcgctgcattcgccggtttcgccggcagcttcttcgcggcccgccaaggcctggtgacacccgaatccttcaccttcatcgagtcggcaatcatcctcgccatcgttgtgctcggtggcatgggctcgcaactgggcgtgattctggcggccattgtgatgatcctgctgccggaactgatgcgtgagttcagcgactaccgcatgttgatgttcggcgccctgatggtgctgatgatgatctggcgtcctcaaggcttcctgccgatgcaacggcctgaaatgaaattgaaagcggagctgcccaaatag

SEQ ID NO: 743 - protein, 421 aa, Pseudomonas syringae
MSKSFKQALFSAALVWAVAYPVFGLKLAFSGVTLQVQNASPLTLTIIAVCSVLLFLRVLFAEQISSLRRGSEKPLIPQKTSDFLTQPKTQRWGLAALIVLAFIWPFFGSRGAVDIATLILIYVMLGLGLNIVVGLAGLLDLGYVGFYAVGAYSYALLSHYYGLGFWICLPIAGMMAAVFGFLLGFPVLRLRGDYLAIVTLGFGEIIRIFLRNLTELTGGPNGISNIDKPTFFGLTFERKAAEGMQTFHEYFGLPYNSINKVVFLYLIALLLALAALFVINRLLRMPIGRAWEALREDEIACRALGLNPTVIKLSAFTLGAAFAGFAGSFFAARQGLVTPESFTFIESAIILAIVVLGGMGSQLGVILAAIVMILLPELMREFSDYRMLMFGALMVLMMIWRPQGFLPMQRPEMKLKAELPK

SEQ ID NO: 744 - DNA, 924 bp, Pseudomonas syringae
  CDS (1)..(924)
atgcccgagtttttccactacatgcagcagctggtcaatggtctgaccattggcagtacgtatgcattgatcgccatcggctacacgatggtgtacggcatcattggaatgatcaacttcgcccatggcgaggtgtacatgatcggttcttatgtggccttcatggcactcgccggtctggcgatgctggggattcatagcctgccgttgctgatgattgccggctttgccgcagcgatcgtcgtaaccagcgcctacggatacagcatcgagcgtgtggcctatcggccattgcgcaacagcaaccgtctgattccactgatttctgcgatcggcatgtcgatctttctgcagaactcggttcagctttctcagggttccggcaactttgccatccccaacctgctgcccggcagcctgtcgttcgggcccggtggttcgcaggaagtgcttatttcctacatgcagatcgtggtgttcgtcgtcaccctgctggccatgaccggcctgaccctgttcatctcccgctcgcgaatgggccgcgcctgccgcgcctgcgccgaagacatgaaaatggccaacctgctgggcatcaacaccaacaacatcattgccctgaccttcgtggtcggcgcggcactggccgccgtcgccgcgatgctgctgagcatgcaatacggcgtgatcaacccgagtgccgggtttctggtcggcctgaaagcgttcacagcggcggtgctgggcggtataggatcgatccctggcgcggtgctcggcggtctggtattgggcgtcgccgaggcgttcggtgccgacattttcggtgatcagtacaaggacgtcgtggccttcggcctgctggttctggtgctgctgttccgaccgaccggtattctgggtcgtccggaggttgaaaaagtatga

SEQ ID NO: 745 - protein, 307 aa, Pseudomonas syringae
MPEFFHYMQQLVNGLTIGSTYALIAIGYTMVYGIIGMINFAHGEVYMIGSYVAFMALAGLAMLGIHSLPLLMIAGFAAAIVVTSAYGYSIERVAYRPLRNSNRLIPLISAIGMSIFLQNSVQLSQGSGNFAIPNLLPGSLSFGPGGSQEVLISYMQIVVFVVTLLAMTGLTLFISRSRMGRACRACAEDMKMANLLGINTNNIIALTFVVGAALAAVAAMLLSMQYGVINPSAGFLVGLKAFTAAVLGGIGSIPGAVLGGLVLGVAEAFGADIFGDQYKDVVAFGLLVLVLLFRPTGILGRPEVEKV

SEQ ID NO: 746 - DNA, 882 bp, Pseudomonas syringae
  CDS (1)..(882)
atgcaagggttcaacgggctttcggtgttctgcgtgctgctgctcatggcgctcgggctggcaatcattttcggccagatgggcgtgatcaacatggcccacggcgagtttctgaccgtcggcgcgtacaccacctatgtgctgtcgacgctggtgcagacctatatgccgtctatgcagccttactactttttcttcgccattgcgctgtcgttcgtagtggcgggctcgattggctggctggtcgagcgggtgatgatcagccgtctctatcaccggccgctggacacattgttggcgacctggggtttgtcgctggtaatgcaacaagcgctgcgttcgatcttcggtgcccgggaagtcagcgccaacccgcccgagtggctgatgggcgcggtcagcctgagcgacaccatcgagattccgcgcaatggcctgttcgtgatggcgctgaccgtgctgctgaccggttgcatcttcctcatgctgtaccgcacacgctggggcctgcatgtgcgggcaacggtgcagaaccgggtgatgagccgcgccgtggggatcaacacccgcgaagtggaccgcatgacctttgcgctgggttgcggcgtggcgggggtggcgggcgcggcgtttaccaccatcggctccaccgggccgacggccgggtcgctgtatatcgtcgacacgtttctggtggtggtcttcggcggtgcgcaaagcctgctgggcacgattgcttcggcgttcaccattgcccagacgcagtcgattgccgagtttttcatgagtggatcgatggccaaggtgctgaccctgtctgccgtgattctgattctgctgatgcgcccgcaagggttgttctcaagcaaagttcgcaagtag

SEQ ID NO: 747 - protein, 293 aa, Pseudomonas syringae
MQGFNGLSVFCVLLLMALGLAIIFGQMGVINMAHGEFLTVGAYTTYVLSTLVQTYMPSMQPYYFFFAIALSFVVAGSIGWLVERVMISRLYHRPLDTLLATWGLSLVMQQALRSIFGAREVSANPPEWLMGAVSLSDTIEIPRNGLFVMALTVLLTGCIFLMLYRTRWGLHVRATVQNRVMSRAVGINTREVDRMTFALGCGVAGVAGAAFTTIGSTGPTAGSLYIVDTFLVVVFGGAQSLLGTIASAFTIAQTQSIAEFFMSGSMAKVLTLSAVILILLMRPQGLFSSKVRK

SEQ ID NO: 748 - DNA, 882 bp, Pseudomonas syringae
  CDS (1)..(882)
atggaattcttctttgaagtgctgatcggcgggttgctggccggtgtcatgtactcgctggtggcgattggctttgtgctgatctacaaggcctcgggcgtgttcaatttcgctcaaggcgcgatggtgctgttcgcggcactgacgtttgtcagcctgctggagcgtggcgtgccgttcttctgggcgtttctggcgacgttggcgagcatggccgtgctggcactgctgatcgaaagactggtcctgcgcccgctggtcaaccggccgccgatcatcttgttcatggccacccttggcctttcgtacatgatcgaaggcttggcgcaagcgttgtggggcgcgcaggtgcacggcctggaactgggcattcccgacgagccactggaaattcgcggcatgctgctctcgcagttcgacctgttcgcagcgggcacggctgcggcgctggtgattgccctgtcggtgctgttcaaccgcacgcggatcggcctgtcattgcgggcggtggcggatgacccgctggcgtcgttggcggtgggtatccggctgccacgcatctgggcggtggtctgggccgtggccgggtttgtcgggctggtggccgggctgctttggggcgcgcggctgggggtgcagttttccctgtcgctggtggtgctcaaggcactgccggtgctgatcatcggtgggttttcctcgattggcggcgccattgtcggcggcctgatcatcggcgcgtccgagaagctggccgagatttacctggggccgatcatcggcagcggtatcgaaaactgggtgccgtatgtgctggcgctgttgtttctgctggttcgtcctgctggcctgttcggcgagcgggcgatagagcgcgtctga

SEQ ID NO: 749 - protein, 293 aa, Pseudomonas syringae
MEFFFEVLIGGLLAGVMYSLVAIGFVLIYKASGVFNFAQGAMVLFAALTFVSLLERGVPFFWAFLATLASMAVLALLIERLVLRPLVNRPPIILFMATLGLSYMIEGLAQALWGAQVHGLELGIPDEPLEIRGMLLSQFDLFAAGTAAALVIALSVLFNRTRIGLSLRAVADDPLASLAVGIRLPRIWAVVWAVAGFVGLVAGLLWGARLGVQFSLSLVVLKALPVLIIGGFSSIGGAIVGGLIIGASEKLAEIYLGPIIGSGIENWVPYVLALLFLLVRPAGLFGERAIERV

SEQ ID NO: 750 - DNA, 882 bp, Pseudomonas syringae
  CDS (1)..(882)
atgcaagtcttcagcgggttttcgctgttttcggtgctggtgctgatggcactcgggctgaccatcgtgttcggcctgatgggcgtgatcaacatggcccacggtgaactgatggcgatgggctcatacgcgacctacgtcacttcagtggtgtttcagcgctactttcccgagcttatgggttggtacttcatcatcggcatcggggtggccttcgtggtgacgtttgcctttggttttctgctggagcgctgtttcattcgcttcatgtacaaccgcccgctggacacgctgctggccacctggggcctgtcgctggtgttgcaacaactgtttcgtcaggtgttcggccccaaggaagtcagcgtgcccactgtgcagtggctgcagggcgcttggaaagtcagcgagggcctggagctgccgctcaaccggattttcatcatcggcctgacctttgtcatcgccgctgccgtgtttgtgtttctgtaccgcagccgctggggcctgcgcattcgtgccgtgacccagaaccgggcgatggccggtgccgccgggatcaataccgcgcgggtcgattcggtgacgttcgcgctgggctgcggcctggcgggtattgccggcagctcgttcaccatgctcgcctccaccggtccggtgagcggccagcagtatctggtggacaccttcatcgtcgtcgtgttcggcggtgttgaaagcttacttggcacgttcctgtcggccttcgccatcggccagacgcagatctcgctggaatacctgaccaccggttccatggccaaagcgatcaccttgctggtggtcatcgtgctgctgttcttccgccccaacggcctgttcgccacgaaagtgagacgttga

SEQ ID NO: 751 - protein, 293 aa, Pseudomonas syringae
MQVFSGFSLFSVLVLMALGLTIVFGLMGVINMAHGELMAMGSYATYVTSVVFQRYFPELMGWYFIIGIGVAFVVTFAFGFLLERCFIRFMYNRPLDTLLATWGLSLVLQQLFRQVFGPKEVSVPTVQWLQGAWKVSEGLELPLNRIFIIGLTFVIAAAVFVFLYRSRWGLRIRAVTQNRAMAGAAGINTARVDSVTFALGCGLAGIAGSSFTMLASTGPVSGQQYLVDTFIVVVFGGVESLLGTFLSAFAIGQTQISLEYLTTGSMAKAITLLVVIVLLFFRPNGLFATKVRR

SEQ ID NO: 752 - DNA, 915 bp, Pseudomonas putida
  CDS (1)..(915)
atggatggtattttcctgcagcaactggtcaacggcctgaccctcgggtcggtctatggcctgatcgccatcggctacacaatggtctatggcattatcggcatgatcaacttcgcgcacggcgaggtgtacatgatctccgcttacctcgcggcgatcagcctggcattgctggcttacttcggtgtcgaatcgttccccctgctgatgctgggcaccttgttgttcaccatcgtcgtcaccggcgtttatggtttcaccatcgagcgcatcgcctacaaaccgctgcgtaactccacccgcctggcaccgctgatcagtgccatcggcatttcgctgatcctgcagaactacgcacagatcagccagggcgcccgccagcaaggcgtgccaaccctgctggaaggcgccatgcgtgtcgaagtcgggtccggcttcgtgcaactgacttataccaagatcttcatcctggtggcggcctttgtcggcatgggcctgctgacctacgtgatcaagtacaccaagctcggccgcatgtgccgtgctacccagcaagaccgcaagatggcctcgatcctgggtatcaacaccgaccgggtaatctcctacgtgttcgtcatcggtgcagtgatggccgccctggccggcgtgctcatcaccatgaactacggcaccttcgacttctacgccggcttcatcatcggtatcaaggcgttcactgccgcagtgctcgggggtatcggctcgctgccgggtgccatgctcggcgggatcatcctgggaatttccgagtcgctgttctcaggcctgatcaactccgactacaaggatgtgttcagcttctcgctgctggtgatgatccttatcttccgcccacaaggcctgctgggtcgcccgctcgtggctaaggtgtga

SEQ ID NO: 753 - protein, 304 aa, Pseudomonas putida
MDGIFLQQLVNGLTLGSVYGLIAIGYTMVYGIIGMINFAHGEVYMISAYLAAISLALLAYFGVESFPLLMLGTLLFTIVVTGVYGFTIERIAYKPLRNSTRLAPLISAIGISLILQNYAQISQGARQQGVPTLLEGAMRVEVGSGFVQLTYTKIFILVAAFVGMGLLTYVIKYTKLGRMCRATQQDRKMASILGINTDRVISYVFVIGAVMAALAGVLITMNYGTFDFYAGFIIGIKAFTAAVLGGIGSLPGAMLGGIILGISESLFSGLINSDYKDVFSFSLLVMILIFRPQGLLGRPLVAKV

SEQ ID NO: 754 - DNA, 1308 bp, Pseudomonas putida
  CDS (1)..(1308)
atgaacatgtccgttgccaaaactgcctctattagcgaaaccaagggtttcgaccttaaacgcagcctgctggagaccattgtcgctggcctgctggcacttatcgtgtttggtccggtcgttggtgtggtgctcgacggctacaccttcaatgccgagccgcgccgcgtggcctggctggtcggcggtgtgatggtggggcgcttcctgctcagcctgttcctgcagactgcccccgggcagcgcatgctcctgggcttcgacagcggtggctcgggcgtgcatgtgaccgcaccggactacaagtcgcgcctgcgttacatcatccccgcgctgatcgtgattgccatcgttttcccgatcttcgccaacaagtacctgctgaccgtggtcatcctcggcctgatctacgtattgctgggccttggcctgaacatcgtggtcggcctggccggcctgctcgacctgggttacgtggcgttctatgccatcggtgcctacggcctggcgctgggttaccagtacctggggctgggcttctggagcgtgctgccgctggcggccatcgctgcggcgctggcggggtgcatcctcggcttcccggtgttgcgcatgcacggtgactacctggcgatcgtgacgctgggctttggcgagatcattcgcctggtgctgaacaactggctatcgttcaccggtggccccaacggcatgccggcaccttcacccaccttcttcggccttgagttcggccgccgggccaaggatggcggggtgccgatccacgagttcttcggcttcgagtacaacgccagcctcaagttcgtgttcatctacgcggtgctgttcatggtcgtgctggcagtgctgtacatcaagcatcgcctgactcgcatgccggtcggccgggcctgggaagcgctgcgcgaagacgagattgcctgccgttcgatgggcctgaaccacgtgctggtcaagctgtcggcctttaccctgggcgcctcgactgccggtctggccggggtgttcttcgccacctaccagggcttcgtcaacccgtcgtcgttcacatttttcgagtcggcgctgatcctcgccatcgtcgtgctgggtggcatgggctcgaccgtgggtgtggtcatcgcggcgttcgtgctgaccgtggcgccggaactgctgcgcagcttctccgagtaccgggtgctgctgttcggcgtgctgatggtgctgatgatgatctggcgaccgcgtgggctgatccgtatcagccgtaccggtgtgaccccacgtaaaggagtggcgccatga

SEQ ID NO: 755 - protein, 435 aa, Pseudomonas putida
MNMSVAKTASISETKGFDLKRSLLETIVAGLLALIVFGPVVGVVLDGYTFNAEPRRVAWLVGGVMVGRFLLSLFLQTAPGQRMLLGFDSGGSGVHVTAPDYKSRLRYIIPALIVIAIVFPIFANKYLLTVVILGLIYVLLGLGLNIVVGLAGLLDLGYVAFYAIGAYGLALGYQYLGLGFWSVLPLAAIAAALAGCILGFPVLRMHGDYLAIVTLGFGEIIRLVLNNWLSFTGGPNGMPAPSPTFFGLEFGRRAKDGGVPIHEFFGFEYNASLKFVFIYAVLFMVVLAVLYIKHRLTRMPVGRAWEALREDEIACRSMGLNHVLVKLSAFTLGASTAGLAGVFFATYQGFVNPSSFTFFESALILAIVVLGGMGSTVGVVIAAFVLTVAPELLRSFSEYRVLLFGVLMVLMMIWRPRGLIRISRTGVTPRKGVAP

SEQ ID NO: 756 - DNA, 1041 bp, Pseudomonas putida
  CDS (1)..(1041)
atgcgcctgctgggtgaaaccggcgacccgctggcccgcacccgcctcgaagccctgctgcagcccgatgcagaactagacccgggcgtgcgcacagccgccgaaacgagcctggcccaggtcaagcgcaaactgctgctaggcgaactgctcggccaggccttcagcggcctgtcgctgggttcggtcctgctgctggcagcgctgggccttgcgatcaccttcggcctgctcggggtgatcaacatggcccatggcgagatgttgatgctcggcgcctacagcacctacatggtccaggtactgctgcagcgcttcgccccaggcgccatcgagttctacccgctgattgccctgccggtggccttcgccgtcagtgccggggtaggcatggcgctggagcgcacggtgatccgccacctgtacggccgcccactggaaaccctgctggccacctggggcatcagcctgatcctgatccaggccatccgcctgctgttcggcgcgcagaacgtcgaggtgagcaacccggcctggctgtctggcggcatccagctgctacccaacctggtgctgccgtacaaccgcctggtcatcatcggcttcgccctggccgtggtgctgcttacctggctgctgctcaaccgtacccggttgggtctgaacgtgcgcgcagtcacccagaaccgcaacatggccgcctgctgcggcgtgtccaccgggcgcgtcgacatgctcgcctttggccttggctcgggcatcgcagggctcggtggcgtggctttaagccaggtgggcaacgtcggcccggacctgggccagagctacatcatcgattcgttcctggtggtggtgctcggcggcgtcgggcagctggccggtagcctctgggccgcgttcggcctgggcatcgccaacaagctgctggagccgcagatcggtgccgtactcggcaagatcctcatccttgcgttgatcattctgttcatccagaaacgcccgcaaggcctgttcgccctcaagggacgggtaatcgactga

SEQ ID NO: 757 - protein, 346 aa, Pseudomonas putida
MRLLGETGDPLARTRLEALLQPDAELDPGVRTAAETSLAQVKRKLLLGELLGQAFSGLSLGSVLLLAALGLAITFGLLGVINMAHGEMLMLGAYSTYMVQVLLQRFAPGAIEFYPLIALPVAFAVSAGVGMALERTVIRHLYGRPLETLLATWGISLILIQAIRLLFGAQNVEVSNPAWLSGGIQLLPNLVLPYNRLVIIGFALAVVLLTWLLLNRTRLGLNVRAVTQNRNMAACCGVSTGRVDMLAFGLGSGIAGLGGVALSQVGNVGPDLGQSYIIDSFLVVVLGGVGQLAGSLWAAFGLGIANKLLEPQIGAVLGKILILALIILFIQKRPQGLFALKGRVID

SEQ ID NO: 758 - DNA, 882 bp, Pseudomonas putida
  CDS (1)..(882)
atgaacttcttcctggagaccttgatcggcggcttgctcgccgggaccctgtattcgctggtggccatcggcttcgtgctgatctacaaggccagcggcgtgttcaactttgcccagggcgcgatgctgctgtttgctgcgctgacattcgttagcttgcacgagcagggcctgccgttcgccctggcgttggccctgaccgtactggtgatgatcgtcggcgcgctgctgatcgagcgcctggtgctgcggcccctggtcaatcgctcgcagatcaccctgttcatggccacccttggcctgtcgttcatcatcgagggcctggcccagggcttgatgggcgcccaggtacgtgcgctggatctgggcatcgaggacgtcccgctgttcgtcggcgagctgatgatcagccagttcgacctagtcgcctctggcgtttccgccttgttggtggcagtgctggcgctgctgttcaacaagacccgcatcggtgtggccttgcgtgcggtggccgacgatacccgcgcggcgctgtcgctgggcatcaacctcaaccgcatctggcagatcgtctgggccgtggccggcatggtcgggctggtggccgggctgctctggggggcgcgccagggggtgcagttctcgctctcgctggtagtgctcaaggcgctgccggtgctgatcatcggcggcttcacctcaattggcggagccatcgtcggcgggctgatcgtcggcgccgccgagaacctcgccgaagcctacatcggcccactgatcggcggcggcatcacgccctggttcgcttatttcctcgccctgatattcctttacatccgtccggccggcctgttcggcgaccgggccatcgaacgggtatga

SEQ ID NO: 759 - protein, 293 aa, Pseudomonas putida
MNFFLETLIGGLLAGTLYSLVAIGFVLIYKASGVFNFAQGAMLLFAALTFVSLHEQGLPFALALALTVLVMIVGALLIERLVLRPLVNRSQITLFMATLGLSFIIEGLAQGLMGAQVRALDLGIEDVPLFVGELMISQFDLVASGVSALLVAVLALLFNKTRIGVALRAVADDTRAALSLGINLNRIWQIVWAVAGMVGLVAGLLWGARQGVQFSLSLVVLKALPVLIIGGFTSIGGAIVGGLIVGAAENLAEAYIGPLIGGGITPWFAYFLALIFLYIRPAGLFGDRAIERV

SEQ ID NO: 760 - DNA, 924 bp, Pseudomonas putida
  CDS (1)..(924)
atgcctgagatctaccatttcttccaacaactggttaatggattgaccatcggcagcacctatgccttgatcgccatcggctacacgatggtgtacggcatcattggcatgatcaacttcgcccacggcgaggtgtacatgatcggttcctacgtggccttcatcgccctggcgggcctggccatgatgggtatccattcgctgccgatcctgatgaccgtcgccttcgtcgcgacgatcttcgtcaccagtgcctatggctacagtatcgaacgggttgcctaccgccccctgcgcaacagcaaccgtctgatcccgctgatttctgccatcggcatgtcgatcttcctgcagaacacggtcttgctttcgcaggactccaaggacaagtccatccccaacctgatccccgggagtttctccttcgggccaggcggtgctgaagaagtactgatcagctacatgcaaatcctggtgttcgtcgtcaccctggtggccatgaccctgctcaccctgttcatctctcgttcccgcctaggccgcgcctgccgcgcctgcgccgaggacatcaagatggccaacctgctgggcatcaacaccaacaacatcatcgccctcaccttcgtcatcggtgccgccctggctgccgtggcggccgtgctgctgagcatgcagtacggggtgatcaaccccaacgccggtttcctggtgggcctgaaggctttcaccgcggcggtactgggtggcatcggcagcatcccgggcgccatgctcggcgggctggtgctgggcgtggccgaagcgttcggtgccgatatcttcggcgaccagtacaaggacgtggtggcattcggcttgttggttcttgtcctgctattccggccgaccggcattctgggccgcccggaggttgaaaaagtatga

SEQ ID NO: 761 - protein, 307 aa, Pseudomonas putida
MPEIYHFFQQLVNGLTIGSTYALIAIGYTMVYGIIGMINFAHGEVYMIGSYVAFIALAGLAMMGIHSLPILMTVAFVATIFVTSAYGYSIERVAYRPLRNSNRLIPLISAIGMSIFLQNTVLLSQDSKDKSIPNLIPGSFSFGPGGAEEVLISYMQILVFVVTLVAMTLLTLFISRSRLGRACRACAEDIKMANLLGINTNNIIALTFVIGAALAAVAAVLLSMQYGVINPNAGFLVGLKAFTAAVLGGIGSIPGAMLGGLVLGVAEAFGADIFGDQYKDVVAFGLLVLVLLFRPTGILGRPEVEKV

SEQ ID NO: 762 - DNA, 1257 bp, Pseudomonas putida
  CDS (1)..(1257)
atgaacagaaatctcaaacaggcgttcttcagcgccttgctggtctgggccgtggccttcccggtactgggcctgaaactgagcatcgacggcatcagcctggtcgtgcacagtcagggctcgttcaccatcagcatcatcgccgtgtgttccgtgctgatgttcctgcgcgtgctgttcgacaagcagtggagttcggtgatgggccgccgatcggatcgcaagctgatccccccggcagtcagcaactacctcaccctgcccaagacccagcgctatgtcatcatcgggttgatcgtggtggcactggtatggccgttcttcggctctcgtggtgcggtcgacattgccacgctgatcctgatctacgtgttgctgggcctgggcctgaatatcgtggtcggtctggcgggcctgctcgacctcggctacgtgggcttctatgccgtcggtgcctacagctacgccatgctctcgcattacctgggctggagcttctgggtgtgcctgccgattgccggcctgatggctgccacgttcggcttcctgctcggcttcccggtgctgcgcctgcgtggtgactacctggcgatcgtgaccctcggtttcggtgagatcatccgcctgttcctgcgtaacctcaccgactggaccggcggccccaacggcatcagcaacatccccaagccggagttcttcggcctgaccttcgaacgccgtgcggccgagggcatgcagaccttccacgagttcttcgggctgcaatacaactcgatcaacaaggtcatcttcctgtatctggtggccctgctgctggccctgctggcgttgttcgtgatcaaccgcctgctgcgcatgccgatcggccgtgcctgggaagccctgcgtgaagacgagatcgcctgccgtgctctgggcctgaacccgaccgtgatcaagctctcggcattcaccctgggtgcctgcttcgccggcttcgccggcagcttcttcgccgcgcgccaaggcctggtgacgccggagtcgttcaccttcatcgagtcggcgatcatcctcgccatcgtcgtgctgggtggcatgggttcacaactgggcgtgattctcgcggccatcgtgatgatcctgctgcctgagctgatgcgtgagttcagcgaataccgcatgctgatgttcggtgcgctgatggtgttgatgatgatctggcgtccgcaaggcctgctgcctatgcaacgtccacacatggagctgcgtcgatag

SEQ ID NO: 763 - protein, 418 aa, Pseudomonas putida
MNRNLKQAFFSALLVWAVAFPVLGLKLSIDGISLVVHSQGSFTISIIAVCSVLMFLRVLFDKQWSSVMGRRSDRKLIPPAVSNYLTLPKTQRYVIIGLIVVALVWPFFGSRGAVDIATLILIYVLLGLGLNIVVGLAGLLDLGYVGFYAVGAYSYAMLSHYLGWSFWVCLPIAGLMAATFGFLLGFPVLRLRGDYLAIVTLGFGEIIRLFLRNLTDWTGGPNGISNIPKPEFFGLTFERRAAEGMQTFHEFFGLQYNSINKVIFLYLVALLLALLALFVINRLLRMPIGRAWEALREDEIACRALGLNPTVIKLSAFTLGACFAGFAGSFFAARQGLVTPESFTFIESAIILAIVVLGGMGSQLGVILAAIVMILLPELMREFSEYRMLMFGALMVLMMIWRPQGLLPMQRPHMELRR

SEQ ID NO: 764 - DNA, 861 bp, Pseudomonas putida
  CDS (1)..(861)
atgctcgatttgtacctgttccaactgctcaacggcctgggcctggggatgatctacttcctcatcgccgtaggcctgacgatcattttcggcctgctcaacttcgtcaacttcgcccacggcgcgtttttcttgctgggcgcctacctgtgctacaccgccgtggccgtcaccggcaacttctggctggcgctgctgattgcgccactggtggtggccgcgctggcctgggcggtcgagcgcctgttgatcaaacgcatctaccacctgccgcacaccttccagatcctcgtcaccctcggcatcgcgctgatcatccaggaagcgtcggtgctgatctggggcccggtgggcaaaaacattgccgtgccacccgaactgcgcggggtgctgatactcggcgacttcatctacccctactaccgcttgttcctgatcggcttcgcagcgctgatcggtattggcctgtggctgctgctggaacgcacccgtttcggcgcactggtgcgggccggtagcgaaagcaccgagaccgtgtcgctgttgggcaccaacattttccgcctgttctccctgacattcgccctgggcgtgggcctggcaggtgtggcgggtgtgctatttgcgccgctacggggcgcccagcccttcgtcggcccggaaatcctcggcattgccttcgtggtggtggtgattggcggcatggggtcgttcggcggggcgctggttggcggcctgctggtgggtgtggtgcaaagcatgatgaccagtctctggccgcaaggcgccagcctgatgatctacggcgccatggcagcagtgattctggtccgtccctacggcctgttcgggagagcctga

SEQ ID NO: 765 - protein, 286 aa, Pseudomonas putida
MLDLYLFQLLNGLGLGMIYFLIAVGLTIIFGLLNFVNFAHGAFFLLGAYLCYTAVAVTGNFWLALLIAPLVVAALAWAVERLLIKRIYHLPHTFQILVTLGIALIIQEASVLIWGPVGKNIAVPPELRGVLILGDFIYPYYRLFLIGFAALIGIGLWLLLERTRFGALVRAGSESTETVSLLGTNIFRLFSLTFALGVGLAGVAGVLFAPLRGAQPFVGPEILGIAFVVVVIGGMGSFGGALVGGLLVGVVQSMMTSLWPQGASLMIYGAMAAVILVRPYGLFGRA

SEQ ID NO: 766 - DNA, 879 bp, Lactobacillus plantarum
  CDS (1)..(879)
atgcagacatttggacaacaattgatcaacggactatcgctaggaagtatctacgcgttattggcgctaggctacacgatggtttatggcattatcaaattaattaattttgcacatggcgatatttatatgttgggggccttttggggctattacagtttgaagtcactacactttaactttgttgcggcgctcctgtccgcaatggtgatctgcgcagttagtggtgtgattattgaatatttcgcgtaccgcccattacgccattcaccgcgaattaccgcgctaatcacggcaatcggtgtttcattcttgcttgagaatggaatgtcatactttgttggtgcgagtgcccgttcatttccccaagcaatcaaagtggtgacttatcactggggcggattgcgggtatcgaatgtgcagctactgatcttaggaacggcgtgcctattaatgattctattggaattaattatcaaacgtaccaaaatgggtaaagcaatgcgggccgtttctgttgatcccgaagctgcacagttggtgggcatcaatcttaaccatacgatttcgttcacgttcgcattagggtctgcaatggccggcgctgccggagtcttgattggcctatactataattcgattgatccgttgatgggcatgacgcccggtatcaaggcctttgtcgcagccgtgattggtgggattggttctgtgcctggggcttcattggggggctttattatcggcatcctggagactggtgttcaggcgattggcctatccgcatacaaggacgcggtggtttactttgtcttaattgttattttgctcgtgttgccggctggaatattcggtaaacgaaccaaggaaaaagtctga

SEQ ID NO: 767 - protein, 292 aa, Lactobacillus plantarum
MQTFGQQLINGLSLGSIYALLALGYTMVYGIIKLINFAHGDIYMLGAFWGYYSLKSLHFNFVAALLSAMVICAVSGVIIEYFAYRPLRHSPRITALITAIGVSFLLENGMSYFVGASARSFPQAIKVVTYHWGGLRVSNVQLLILGTACLLMILLELIIKRTKMGKAMRAVSVDPEAAQLVGINLNHTISFTFALGSAMAGAAGVLIGLYYNSIDPLMGMTPGIKAFVAAVIGGIGSVPGASLGGFIIGILETGVQAIGLSAYKDAVVYFVLIVILLVLPAGIFGKRTKEKV

SEQ ID NO: 768 - DNA, 963 bp, Lactobacillus plantarum
  CDS (1)..(963)
atgaaagcaaatttgaaaactaacatggcgtggctcggtgtgatggttatcggctttgttgtgattgacggtttagagctgatgggcgtcattaactcgtttattgaaaatatgctggtgacgattggtatcaacgttatattggcggtgggactcaatctgattattgggtttgcaggccagttctcgcttggtcacgtcggctttatggcaattggcgcctacgcgactggtattatgacccaaacaatggcgacgcccgcgggattttatctgtcgatgatcgtcggcatggtgattgccatggtagcggcggtcattgttggcatcccaacattacgattgcgcggtgattacttagccattgcgacgatgggggcggccgaaatcattcggattctaatcaataatctgaaaattacgaacggtgcagcggggttattcaatatcccggcacttgcttcgtgggcaacggtgtacgtcttaatgtgtctgacaacgattatcacggtcaactttattcacagtcgcggtggtcgggccgtgatggctgtgcgggatgatgaactggcggctggtgccatgggaatcaatacgacgcgctggaagttggccgctttcgtctttggcgcggcgactgcggcgattggtgggtcgttgcacgcggcctacattcagacgattgcgccgggtgattttaatatcatggcttccattgcgattctgattattgtcgtactcggtggggtcggcagtattaccgggactttcgtagccgcaatcgtattaggagcgctcgacacgatcttacaaaacttcggtacgatccgaatgattatttattcattggcactgattttgattatgatttttaagccagccggactgttaggaacgtgggagttctcattcacgcgtctattcagacggcgatcaactaaggaggcggttaaccatgagtag

SEQ ID NO: 769 - protein, 320 aa, Lactobacillus plantarum
MKANLKTNMAWLGVMVIGFVVIDGLELMGVINSFIENMLVTIGINVILAVGLNLIIGFAGQFSLGHVGFMAIGAYATGIMTQTMATPAGFYLSMIVGMVIAMVAAVIVGIPTLRLRGDYLAIATMGAAEIIRILINNLKITNGAAGLFNIPALASWATVYVLMCLTTIITVNFIHSRGGRAVMAVRDDELAAGAMGINTTRWKLAAFVFGAATAAIGGSLHAAYIQTIAPGDFNIMASIAILIIVVLGGVGSITGTFVAAIVLGALDTILQNFGTIRMIIYSLALILIMIFKPAGLLGTWEFSFTRLFRRRSTKEAVNHE

SEQ ID NO: 770 - DNA, 876 bp, Bradyrhizobium japonicum
  CDS (1)..(876)
atgctggatttcgttcagcagctggtcagcggtgttgcgctcggctgcgtctacggcctgatcgcgctcggcttcgtgctggtctacaaggcgaccgaggtcgtcaacttcgcccagggcgacctgatgatgctgggcggcttcttcgccttcaccttcatcggcatgatgggcctgaactactggatcggctttgccggtgcggtggccgcgatggcgctgttcggcatgctggccgaacgcgtggtggtgcggccgatcctcggctatccgcaattctccatcatcatggcgaccatcgggctcggctacttcctgcgctcgatcgccggcatgatctggggcaccgatgatctgaagatcgagacgccgttcagccagggcgtgctgcgcatcggctcgctggtgctcgcctacgacaagctctcggtgatcgcggcgacgatgatcctgtgcacgctgctctggctcttcttcaacaggaccacgctcggcaccgcgatgcgcgccagttccgagaacatgctggcggcctattacatgggcatcccggtcaagcgcgtggtgtcgatcgtctgggcgatcagcgcggcggtcgcgacctgcgccggcgtgctgctggcgccgatcaccttcattcactccaatgtcggcctcgtgctcggcctcaaggcattccccgccgcagtcctcggcggcttcggctcgatccccggcgcggtggtcggcggcgtcctgatcggcgtgatcgagagcatggccggcttctatctggccgagggctggaaggacgtcgcgccgtacgtcgtgctgctcgccgtgctgctgctcaagcccgaaggcctgttcggccttcacgtccgcaagaaggtctga

SEQ ID NO: 771 - protein, 291 aa, Bradyrhizobium japonicum
MLDFVQQLVSGVALGCVYGLIALGFVLVYKATEVVNFAQGDLMMLGGFFAFTFIGMMGLNYWIGFAGAVAAMALFGMLAERVVVRPILGYPQFSIIMATIGLGYFLRSIAGMIWGTDDLKIETPFSQGVLRIGSLVLAYDKLSVIAATMILCTLLWLFFNRTTLGTAMRASSENMLAAYYMGIPVKRVVSIVWAISAAVATCAGVLLAPITFIHSNVGLVLGLKAFPAAVLGGFGSIPGAVVGGVLIGVIESMAGFYLAEGWKDVAPYVVLLAVLLLKPEGLFGLHVRKKV

SEQ ID NO: 772 - DNA, 1770 bp, Bradyrhizobium japonicum
  CDS (1)..(1770)
atgcagagccggctccccatcctcgtcttcgcgcttgtcatggcggcgatcccgtttgtcccgggcatgccgccgttctggatcgtgctgctcgacaatatcggccttgccgccctcgtcgcgatgggcctcgtgctgctgacgggcgtcggcggcctgacctcgttcggacaagccgccttcgtcggcttcggcgcctacaccaccgcggtgctgtcgacgagctacggcctgtcgccctggctgacgctgccgttgtcgctcgtggtcagcggatcgctggcggtgctgcttggcctcgtcaccgtccgcctctccggccactatctgccgctcggcacgctcgcctgggggctcggcctgttctatctcttcagcaagctggagtttttgggccgcaacgacggcatctcggcgatcccgccgctgtcgatcggcgcgttcaagatgctctcgcccggctcgatctactacgcgatctgggtcgccgtgatcctctcggccctgctcacgatgaacctgctggactcccgcaccggccgcgccatccgcgcgctcaggcgcggccatgtcgccgccgaggcgttcggcgtgcacacgccgcgggcaaagctactggtgttcatccacgccgcggtgctagccggtctctccggctggctctatgcccaccttcagcgcgcggtgaacccgacgccgttcggcgcacaggccggcatcgaatatctcttcatcgcggtggtcggcggcgccggctatgtctggggcggcgtgctgggcgcggcgatcgtcgtggtcctgaaagaggtgctgcaaagctatctgccgctgctcctgccgggttccggccaggtcgagaccatcgtgttcggcatcatgctggtggcgctgttgcaactcgcgcccggcggcgtctggccctggctgatgtcgttcctgcccgagcctacccgcggcaggaagccggacacctcgctgaagctggagcagcgcacccgcgcgcccggcgaagccagcgtcctgctccaggtcgagaaggcacgcaagcaattcggcggcgtgatcgcggtcaacaacgtttccttcgaggtccaggcccgcgagatcgtcgcgctgatcgggccgaacggcgccggcaagagcacgacgttcaacctgatcaccggcgtgctgtcggcgacctcaggctcgatctcggtgcttggcaagaggctcgacaacgcgccgccgcaggagatcgtcaagctcggcatctcccgcaccttccagcacgtgaagctggtccccgacatgaccgtgctggagaacgtcgctatcggcgcgcatctgcgcggtcattcggggccgatctcctccatgctgcggctcgaccgcgccgacgaggcaaagctgctcgccgaggccgcacgccagatcgagcgcgtcgggcttgccgaccagatgcaccagctcgcaggttcgctctcgctcggccagcagcgcatcgtcgagatcgcgcgcgcgctgtgcgtcgatccgatgctgctgctgctcgacgagccggccgccggcctgcgccacatggagaagcagcagcttgccaggctgctgcgcgaattgcgcgacggcggcatgagcgtgctgctggtcgagcacgacatgggctttgtcatgaacctcgccgaccgcatcgtcgtgctcgatttcggcaccaagatcgcggagggcacgcccgccacgatcaagaccaatcccgaagtgatcaaggcctatctcggagtggcggcatga

SEQ ID NO: 773 - protein, 589 aa, Bradyrhizobium japonicum
MQSRLPILVFALVMAAIPFVPGMPPFWIVLLDNIGLAALVAMGLVLLTGVGGLTSFGQAAFVGFGAYTTAVLSTSYGLSPWLTLPLSLVVSGSLAVLLGLVTVRLSGHYLPLGTLAWGLGLFYLFSKLEFLGRNDGISAIPPLSIGAFKMLSPGSIYYAIWVAVILSALLTMNLLDSRTGRAIRALRRGHVAAEAFGVHTPRAKLLVFIHAAVLAGLSGWLYAHLQRAVNPTPFGAQAGIEYLFIAVVGGAGYVWGGVLGAAIVVVLKEVLQSYLPLLLPGSGQVETIVFGIMLVALLQLAPGGVWPWLMSFLPEPTRGRKPDTSLKLEQRTRAPGEASVLLQVEKARKQFGGVIAVNNVSFEVQAREIVALIGPNGAGKSTTFNLITGVLSATSGSISVLGKRLDNAPPQEIVKLGISRTFQHVKLVPDMTVLENVAIGAHLRGHSGPISSMLRLDRADEAKLLAEAARQIERVGLADQMHQLAGSLSLGQQRIVEIARALCVDPMLLLLDEPAAGLRHMEKQQLARLLRELRDGGMSVLLVEHDMGFVMNLADRIVVLDFGTKIAEGTPATIKTNPEVIKAYLGVAA

SEQ ID NO: 774 - DNA, 1026 bp, Bradyrhizobium japonicum
  CDS (1)..(1026)
atgctgttcctggtgcaggacggcatcaccaatggcgcgatctatgcgctgctcggcctcgcgctggtgctggtgttcgccgttacccgcgtgatcctcattccccagggcgagttcgttacctatggcgcgctgacctatgcctcgctggccgcgggccagatgccgggcacggcaaagctcgcgctcgccctcggcatcggcgccttcggcttcgacctgttcgtggcccgcaaggcgctgcatggccggctgatcctgcgcagcgtcctcaccaatatcgtgctgccggccatcgtgctggcgctgacaatctacttcgccgcccagaagccgccggtggcggtctgcatcgcgctgtcgctggtgatcgtggcgatgatcggcctgtatctctaccgcatcgcgttccagccgctggcgcacacctcggtgctggtgctgctgatcgcctccgtgggcgtccacctcgcgctgcagggactgggcctgctgttcttcggcgccgagggccagcgcggacctgccgtgctgtccggctctttcaccgccggcgcgctgcgtttcaccggccagagcatcaccgtctacgccatcaccatcgccttcatcgtcgggctctggctgttcttcggcctgacgctctacggcaaggcgctgcgcgcgaccgccgtgaaccggctaggggcgcggctcgctggcatccgcaccacgctgtcggggcagatcgccttcctgctggcgtccgtcatcggcgcgctgtcgggcatcatgatcgtgccgatcacgacgctctattacgacagcggcttcctgatcgggctgaagggtttcgttgccgcgatcatcggcggcctcgtcagctaccccctcaccgccgtcgccgcgctggtcgtcggcatcgtcgaggcgttctcgtccttctacgcctccaactacaaggaagtgatcgtcttcatgctgctgatccccgtgctgctgctgcgctcgctcgccgcgcccgcggtcgaggaagagaaggactga

SEQ ID NO: 775 - protein, 341 aa, Bradyrhizobium japonicum
MLFLVQDGITNGAIYALLGLALVLVFAVTRVILIPQGEFVTYGALTYASLAAGQMPGTAKLALALGIGAFGFDLFVARKALHGRLILRSVLTNIVLPAIVLALTIYFAAQKPPVAVCIALSLVIVAMIGLYLYRIAFQPLAHTSVLVLLIASVGVHLALQGLGLLFFGAEGQRGPAVLSGSFTAGALRFTGQSITVYAITIAFIVGLWLFFGLTLYGKALRATAVNRLGARLAGIRTTLSGQIAFLLASVIGALSGIMIVPITTLYYDSGFLIGLKGFVAAIIGGLVSYPLTAVAALVVGIVEAFSSFYASNYKEVIVFMLLIPVLLLRSLAAPAVEEEKD

SEQ ID NO: 776 - DNA, 879 bp, Bradyrhizobium japonicum
  CDS (1)..(879)
atggagcttttcaccaatcaagtgctggccggcatcgccacgggcgcgatctatgcctgcatggcgctcgccgtggtcatgatctaccaggccatcgaccatctcaacttcgcgcagggcgagatggcgatgttctcgaccttcatctcctggcagctgatgcagtggggcatcccctactgggccgctttcgtcatcacgctggcgctctccttcgtcggcggcatcgcgatcgagcgcatcctgttcaagccgctggcgaaggcgcccgtgctgaccaacgtcgccggcttcatcgcgctgttcgcgatcatcaactcctcggccggcctgatctgggacttcaccatcaagcaatatccgaccccgttcggctcttcgccgttcctcggcagccagctgatctcgacccaccaggccggcatgatcggcgtcaccgtgctgctgctgctcggcctgtatttcttcttccagtacacgcggatcggccttgccatgcgcgcggccgcctcggtgcctgaatcggcgcgcctcgtcggcatcaacacgagctggatgatcgcgctcggctggggcatggcgtccgcgatcggctcgatcgccggcatgctgatcgcgcccgtggtgttcctcgagcccaacatgatgggcggcgtgttgatctacggctttgccgccgcggtgctgggcggactgaccagcccgttcggcgccgtggtcggcggcttcctggtcggcatcttcgagaatctcgccggcacctacatccccggcgtcggcaacgagctgaaactcccgatcgcgctcgcgctgatcatctccgtcctggtcgtcaaacccgctggtctgttcggccggcacatcgtcaagcgagtttga

SEQ ID NO: 777 - protein, 292 aa, Bradyrhizobium japonicum
MELFTNQVLAGIATGAIYACMALAVVMIYQAIDHLNFAQGEMAMFSTFISWQLMQWGIPYWAAFVITLALSFVGGIAIERILFKPLAKAPVLTNVAGFIALFAIINSSAGLIWDFTIKQYPTPFGSSPFLGSQLISTHQAGMIGVTVLLLLGLYFFFQYTRIGLAMRAAASVPESARLVGINTSWMIALGWGMASAIGSIAGMLIAPVVFLEPNMMGGVLIYGFAAAVLGGLTSPFGAVVGGFLVGIFENLAGTYIPGVGNELKLPIALALIISVLVVKPAGLFGRHIVKRV

SEQ ID NO: 778 - DNA, 1665 bp, Bradyrhizobium japonicum
  CDS (1)..(1665)
atggtgcagctgcatacgccgctgccgctcaccatcatcgtggtcgcggtggccgcagcgctggtcgggctgatcatcgagcggttcggcctgcggccgctccagaactcggtgcgcatcgcgccgctgctcgcgaccatcggcatcagcttcgtgctcgaccagctggtgatgctgacgttctcgccgaacccgcgtgcgctgccgagccagttgccggacgtccgcttccagatcggcggcggcacgatcgggccgctcgatctgctcatcgccggcgtcggcatcaccagcgcgctgctgctgttcgtgttcctgcgctacagcaagctcggctgggcggtgcgcgccacggcgcaggaccgcgatgccgcgatgcagatgggcgtcgatgtcaaccgcgtcaatcaggcggtgttcggcatcgccgcggcgctcggcggcgtctccggcatgctggtcggcatgtactacaaccagatcgacaccgcgatgagccttcaggcgacactcaagggcgtcgtcgccgaagtcgtcggcggcgccggcaacgtgccgggcgcggtgatcgggagcctgttgctgggactggtcgaaagctacggcgtagccgtgttcggcaccagctaccgcaatctgttcgcgttcctgctgctggtcgtcgtgctggtgttgcggccgaacggcctgttcgccagcgcgcggcaggcgccgcccgagccgctcaccgggactttcatcgcgccgagccggccggtgcgcattccgcgctgggcgctgctggtggcggccgctgcctttgcgatcctgccgctgttcccggtgtccttctacgtgctccagaccctgatcaacgcctggctgctcggcatgctcgcgctcagcctcacgctcgttgcaggcacgatcgggcaggtctcgcttggacatgcggcgctgctcgcgatcggcgcctacacgtccgcgctgctgtcgctgagcttcgccgttcccgtcggcctcgccatcatcggcggcggcctgatgagcgctgcgctcggcaccgctctgatctcgccgtcgttccgcctgcgcgggcactacgtctcgatcgcgacgctcgccatcggcgagatcgtgtcgctggtgatcttgaactgggagagcgtcacgcgcgggccgatcggcatctccggcattccgccgctgtcgctgttcggctacgacctcgtcagcccgtcgtcggtctactggttcagccttgcggtcatggtcgttctggcgctgctccaggcgcgcctgctcggctcgcatctcggccgcagctttcgcgccatccgcgacgacgacatcgccgcgcgcgcctacggcctcagcctgaaccgctacaaatcgctggccttcatcttcggcgggtttgcggcgggtgtcagcggcggcatcgccgcgcatctctattcctacatcaaccacgagaccttcaacacgcagcagtccatcctggcgctgacggtcgtgatcctcggcggactcggcaatgtcgtcggcgccatcgtcggatcggtggcgctggtcggcctgcccgaattgttccggatcgcggcggagtaccgcatcctgatctacggcatcgtgctgctgctgctggtgcggttcaggccgcagggcctgttggggacgatgtga

SEQ ID NO: 779 - protein, 554 aa, Bradyrhizobium japonicum
MVQLHTPLPLTIIVVAVAAALVGLIIERFGLRPLQNSVRIAPLLATIGISFVLDQLVMLTFSPNPRALPSQLPDVRFQIGGGTIGPLDLLIAGVGITSALLLFVFLRYSKLGWAVRATAQDRDAAMQMGVDVNRVNQAVFGIAAALGGVSGMLVGMYYNQIDTAMSLQATLKGVVAEVVGGAGNVPGAVIGSLLLGLVESYGVAVFGTSYRNLFAFLLLVVVLVLRPNGLFASARQAPPEPLTGTFIAPSRPVRIPRWALLVAAAAFAILPLFPVSFYVLQTLINAWLLGMLALSLTLVAGTIGQVSLGHAALLAIGAYTSALLSLSFAVPVGLAIIGGGLMSAALGTALISPSFRLRGHYVSIATLAIGEIVSLVILNWESVTRGPIGISGIPPLSLFGYDLVSPSSVYWFSLAVMVVLALLQARLLGSHLGRSFRAIRDDDIAARAYGLSLNRYKSLAFIFGGFAAGVSGGIAAHLYSYINHETFNTQQSILALTVVILGGLGNVVGAIVGSVALVGLPELFRIAAEYRILIYGIVLLLLVRFRPQGLLGTM

SEQ ID NO: 780 - DNA, 882 bp, Bradyrhizobium japonicum
  CDS (1)..(882)
atgcaggcattcctggacattttcgacatctacctgctggaggccgtgatcaacggtatcctgctcggcggcgtgctggcgctgcttgcgctcgggctcaatctgatcttcggcgtcatcgacgtgacctggatctgctatgccgagctcgtgatgatcggcatgtacgccatgtatttcatggtgcagtattacggcgtcagctatttcgtcgcggcgccgttcaccattcttcttgtcgcgctgctcggcgccgcgctgcattacctcgtgatcgcgccgctgctcaccgcgccgccgatcaaccagttgctcgcaaccggtggcgtgctgttcgtgctccagagttttgcgaccgttgccttcggcatcgacttccgcaatctcggcatccgcctgccggtgctcgccttcggcgacatgaatttcagctacgcacgactcctgtcgtttctggctgcgctggtcggcatggtcgccgtctacctgttcatgacgcgcaccttcacgggaaccgcgatccgcgcgatctcgcaggaccggcagatcatggcgctgatgggcgtcgatacgaagaagctctacctcatcacctcggcgctcggcggcgcgctcgcaggcctcgccgcctgcctgctggtgctgcaatacgacgtgcaccccttcgtcggcctgtccttcgggccgatcaccttcctgatctgcgtgctcgggggcctcggcaatttcatcggcggcttcatcgccgccttcgtgttcgccgagatcatctcgctcggcgggctgttctccgacctcgaatggggctatgtgctcgccttcgccttcttcatcgtcatgatgttcatccggcccgcgggcctgcttgcgaggcgccgatga

SEQ ID NO: 781 - protein, 293 aa, Bradyrhizobium japonicum
MQAFLDIFDIYLLEAVINGILLGGVLALLALGLNLIFGVIDVTWICYAELVMIGMYAMYFMVQYYGVSYFVAAPFTILLVALLGAALHYLVIAPLLTAPPINQLLATGGVLFVLQSFATVAFGIDFRNLGIRLPVLAFGDMNFSYARLLSFLAALVGMVAVYLFMTRTFTGTAIRAISQDRQIMALMGVDTKKLYLITSALGGALAGLAACLLVLQYDVHPFVGLSFGPITFLICVLGGLGNFIGGFIAAFVFAEIISLGGLFSDLEWGYVLAFAFFIVMMFIRPAGLLARRR

SEQ ID NO: 782 - DNA, 855 bp, Bradyrhizobium japonicum
  CDS (1)..(855)
atggaagctttgctcttcacgcaaggactcaacgtcatctacgaagcactgatccttgcgatcttggtcctcggcctggccgtcgtgatgggcttgttgaacgtcctgaacatcgcgcatggcgagttcatcatgataggcgcgtatgccgcctacgtggtgcaaagggcaggccttccatatttgctcgcagtgccggccgcggcgctggtttgtggggccatcggctttgtcgtggagcgatgcctgataaggccattgcactacgaaccgttcgagacgctcctggcgacctgggggctgggactgctgcttcgcaagtgcgtcgagcttgcgtttggccgcggttatcgcagcgtcgagataccaatcggtggttcgttgagcctctttggtgaatcctatccagcgtaccgattggtgctgatggcggtcgccgccttggtacttgccggcctgttcatctggtaccgccgcgctccgaccggggctcggatccgtgccatggtcggcaatcccgtgcttgcggaggcggtcggtatccaaacgcgtgaactcgcgcgaaacaccttcgtcacgggcaccgcattggcaggtgtcgccggcgtcatggtcgcgccgctcacgccggtcgaaccattcatggggctcactttcatcgtgaactcattcttcgcgctggtggtcggcggaatgggaacggtatcgggcctgttcgctggcgcgactatcatcggtggtctgcaaagcgttctatcggccgccgtcagcccgacctcggcctatcttgcgatgctcctcatctccatcctcttcctctggcagcgaccccgtggcctatttcctcgtccgtaa

SEQ ID NO: 783 - protein, 284 aa, Bradyrhizobium japonicum
MEALLFTQGLNVIYEALILAILVLGLAVVMGLLNVLNIAHGEFIMIGAYAAYVVQRAGLPYLLAVPAAALVCGAIGFVVERCLIRPLHYEPFETLLATWGLGLLLRKCVELAFGRGYRSVEIPIGGSLSLFGESYPAYRLVLMAVAALVLAGLFIWYRRAPTGARIRAMVGNPVLAEAVGIQTRELARNTFVTGTALAGVAGVMVAPLTPVEPFMGLTFIVNSFFALVVGGMGTVSGLFAGATIIGGLQSVLSAAVSPTSAYLAMLLISILFLWQRPRGLFPRP

SEQ ID NO: 784 - DNA, 867 bp, Bradyrhizobium japonicum
  CDS (1)..(867)
atgcagatcgccgcggaaacgttgttgaacggattgatgctaggggcgctttacgcgctgttcggacttggtctgagcttgagcgtcggggtcatgcgcatgatcaacatcgcccatggcgatctgatcgtcgtcggggcctacctgaccagtgtcgtcatgagcggagcgggcgtcggtgcctttaccgcgttgctcgtggtcattccggtgatgttcgcgctcggttggatcctccagatcatcctgctcaaccgtgtcgtcggaaaagatgctttggctccgcttcttctgacgttcggcctctccatcgtcttgcagaacgttcttcaggagatcttcaccgcggatacgcgaagcttacaggccggtgatctcgcaggtctcgggttcaacgtttttggcgtttccattggagttcttcccctcgtctctgcgctcgcgagcatcgcgctgctcggcgcgacgcattggctcgtcggtcacacccatttcgggcgtcaggcacgcgccgtgtcggatgatccgggcaccgcgaggctggtcggtgtgaacgatagacgtttgtttggaattgtaaccggcgtcatcttttcgatgatcggtgtggcagcggtgctctacgctctccggacgcccttttcgccaacggctggacccgagcggcttctctattcgttcgaggcggtagtgctcggtgggctcggcaatgtctggggtacgttgttcggcggactcgtgatcggcgtcgcacagcttttcggcgccaagatcgcctctggtctcggtcccttcttcggccatctcgcatttctcgtggcactgctcgcccgtccccagggcttgttcggaaaggcgccgtcatga

SEQ ID NO: 785 - protein, 288 aa, Bradyrhizobium japonicum
MQIAAETLLNGLMLGALYALFGLGLSLSVGVMRMINIAHGDLIVVGAYLTSVVMSGAGVGAFTALLVVIPVMFALGWILQIILLNRVVGKDALAPLLLTFGLSIVLQNVLQEIFTADTRSLQAGDLAGLGFNVFGVSIGVLPLVSALASIALLGATHWLVGHTHFGRQARAVSDDPGTARLVGVNDRRLFGIVTGVIFSMIGVAAVLYALRTPFSPTAGPERLLYSFEAVVLGGLGNVWGTLFGGLVIGVAQLFGAKIASGLGPFFGHLAFLVALLARPQGLFGKAPS

SEQ ID NO: 786 - DNA, 867 bp, Bradyrhizobium japonicum
  CDS (1)..(867)
atggaaggcatcgtcgccacactcctcatcggtgtcagcctgggcgcgcagtacgcgctgctcgcccttggcttcaccctggtcttcggcatcctgggcgtggtcaacttcgctcacggcggcttctacgtcctcggcgggtatctcgcctactcgtcaatggcgttcctgggcgcgccgtacctgatcgcggtgatcgttgcggcgctgggtacagccgcgctcggatacctgttcgagcgcttcctgctcgatcgactggtcaatgaccacctttcaacgctcatgctgacgctcggattgtacctgatgatgtcgagcggcctccttgccgttttcgggccgcaatcgcccgcgttcacctttcccttgaccggtgtcctgcgctggcacgggttcttcattccgatcgaaaacctcgtggttctcgtcgtatgcctggtcggcatatcctcggtgtacgcgctgatgtatcgcagtgacttcggccgcgcgcttcgcgctctcgccgatgatcgggccgtggcgaccgctcagggcctgaggccgaaactcctgtttcccgcggcgtttgcgctggcgaccggacttgcgggactcacgggcgcgctggtcacgccgatcctttcgcttgcgccacacgttggcgatcccgtgctggcgacctcatttctcatcgtgatcctcggcggtctcgggagcatcggaggggcgaccgctgcggcgttcctcgtggggatggtggaggcgttttcggccgtctacctcggagggtcaaagggcgccttggtgctgtttgtactcgtgcttctcatgctcgtggtgaagcccgcgggtctgttcggtcagcgtgtgcgtggagcctga

SEQ ID NO: 787 - protein, 288 aa, Bradyrhizobium japonicum
MEGIVATLLIGVSLGAQYALLALGFTLVFGILGVVNFAHGGFYVLGGYLAYSSMAFLGAPYLIAVIVAALGTAALGYLFERFLLDRLVNDHLSTLMLTLGLYLMMSSGLLAVFGPQSPAFTFPLTGVLRWHGFFIPIENLVVLVVCLVGISSVYALMYRSDFGRALRALADDRAVATAQGLRPKLLFPAAFALATGLAGLTGALVTPILSLAPHVGDPVLATSFLIVILGGLGSIGGATAAAFLVGMVEAFSAVYLGGSKGALVLFVLVLLMLVVKPAGLFGQRVRGA

SEQ ID NO: 788 - DNA, 882 bp, Bradyrhizobium japonicum
  CDS (1)..(882)
atgacgatggacctgtcgctgactatcatgcagcttctctccgggatcgcccttggggcggtcctggtgatcactgcgcttggattgacgatcgtgttcggcatgctcggggtggtgaatttcgcccatggcgcgctgttcatgatcggggcctatgctgggctgtatctggcgtcgctcaccggaagcttctggtggggactgctgctcgctcccatcctgatcggcgccttcggcatgctgatcgagttcgtcctgatccgcaggctctatggacgctcggtcgacgatccgttgctgctcaccttcggcctcagctacatcctcgtcgaaggtgtgcgcatcgtgttcgggagcgacggcattccgtttccaaccccgccgcaactggtcggcgtgcttgatctcggcatcggcttcttcccgcgctaccgcctgttcgtcatcgcgctggtggccgtggtgctgctggtgctctggctgacgctggaaaagtcccgcataggcttgatcgtgcgcgccggcgcgcgcgatcccaccatcatgcaggtgctcggcgtcgatatcggccgggtctggcttgcgatcttcggcctcggcgtcgggctcgccgcgctcggcggcgtgctcgccggtcccatgcgcagcgtcaatccggagatgggctcgctcgtgcttgcggaggcgttcgtggtgaccgtgatcggtggccttggttcgatcgtcggggctgtcgttgccggcctcatggtcggcatatccatcagcatggtcgcgctgttcgcccctgagatggcgaccatcgtcatgttcgcgctgatggcggtggtgctgctgatccgcccgcagggcctgttcggcgtcagagggaggaccgcgtga

SEQ ID NO: 789 - protein, 293 aa, Bradyrhizobium japonicum
MTMDLSLTIMQLLSGIALGAVLVITALGLTIVFGMLGVVNFAHGALFMIGAYAGLYLASLTGSFWWGLLLAPILIGAFGMLIEFVLIRRLYGRSVDDPLLLTFGLSYILVEGVRIVFGSDGIPFPTPPQLVGVLDLGIGFFPRYRLFVIALVAVVLLVLWLTLEKSRIGLIVRAGARDPTIMQVLGVDIGRVWLAIFGLGVGLAALGGVLAGPMRSVNPEMGSLVLAEAFVVTVIGGLGSIVGAVVAGLMVGISISMVALFAPEMATIVMFALMAVVLLIRPQGLFGVRGRTA

SEQ ID NO: 790 - DNA, 918 bp, Bradyrhizobium japonicum
  CDS (1)..(918)
atggattatttcgcccagcagctcatcaacggcctcgtgctcggctccatctacggcctgatcgcgatcggctacacgatggtctacggcatcgtcggcatgatcaacttcgcccatggcgacgtcttcatgatcggcggcttcatcgccctgatcaccttcctgatcctgatctcgctcggcctgaccgcgatcccggtgatcctgctcgtcgtgctgctggtcgcgatggcgatcacggcgctctatggctggaccatcgagcgcatcgcctaccggccgctgcggcattccttccgtctcgctccgatgctgtcggcgatcggcatgtcgttcgtgctgaccaactattcgcaggtggcgcaaggcgcccgcgtcaagccgatcccgcccttcatcaccggcggctacacgctgcatgagagcgcggacggcttcgtcatccagctctccaacatccagatcatggtggtcatcaccaccatcgtgctgctggcgatcttcacctggctggtgtcgcacacgcggctcgggcgcgacatgcgcgcctgcgagcaggaccagaccatggcggccctgctgggcgtcgacgtcgaccgcaccatctccatgaccttcgtgatcggcgccgcgctcgccgcggtcgcgggtttcatgtacctgctctattacggtctggtcgatttcttcatgggcttcgtcgccggcatcaaggccttcacggcggccgtgctcggcggaatcggctcgctgccgggcgccatgctcggcggtcttgcgatcggcctgatcgagacgttctggtcggcctatttctcggtcgaatacaaggacgtcgcggcattctcgatcctgatcgtcgtgctgatcttcatgccgaccggcctgctcggccgtcccgaagtcgaaaaagtctga

SEQ ID NO: 791 - protein, 305 aa, Bradyrhizobium japonicum
MDYFAQQLINGLVLGSIYGLIAIGYTMVYGIVGMINFAHGDVFMIGGFIALITFLILISLGLTAIPVILLVVLLVAMAITALYGWTIERIAYRPLRHSFRLAPMLSAIGMSFVLTNYSQVAQGARVKPIPPFITGGYTLHESADGFVIQLSNIQIMVVITTIVLLAIFTWLVSHTRLGRDMRACEQDQTMAALLGVDVDRTISMTFVIGAALAAVAGFMYLLYYGLVDFFMGFVAGIKAFTAAVLGGIGSLPGAMLGGLAIGLIETFWSAYFSVEYKDVAAFSILIVVLIFMPTGLLGRPEVEKV

SEQ ID NO: 792 - DNA, 870 bp, Bradyrhizobium japonicum
  CDS (1)..(870)
atgcaggcactttacgctcagctactggtgggactgatcaacggctcgttctacgcgctgctcagtctcgggcttgccgtgatcttcggcatgctcaacatcatcaatttcgcccacggcgctctctacatgatgggcgccttcgtcgcctatttcctgctgaacaatgattatctcagtatcggctactggccggcattgatcgtcgctccgatcgtcgtcggcatcttcggcatgatcctggaacggaccatgctgcaatggctgaccgggcttgaccatctctacggcctgctgctgaccttcggcattgcgctgatcgtgcagggcgtgttccagaactattttggatcgtcgggcctgccttatgccattcctgaccagctcaagggcggcatgaatctcggcttcatgttccttccggtctatcgcggctgggtcgtcgtgttctcgcttatcgtgtgtctggcgacctggtacctgatcgagaagacgcggctcggcgcttacctccgcgccgcgaccgaaaacccgacgctggtccgcgccttcggcataaacgtgccgcgcatgatcacgctgacctacggtctcggcgtcggccttgccgcgctcgccggcgtgctctcggcgccgatcaaccaggtgcggccgctgatgggcgccgacctcatcatcgtcgtgtttgccgtggtggtgatcggcggcatgggatcgatcatgggctcgatcatcaccggtttcgctctcggcgtgatcgagggcctgaccaagtatttctaccccgaggcctccaacaccgtcgtgttcgtgctgatggtgctggtgctcttggtgaagccatcgggattgacgggaagggcggcctga

SEQ ID NO: 793 - protein, 289 aa, Bradyrhizobium japonicum
MQALYAQLLVGLINGSFYALLSLGLAVIFGMLNIINFAHGALYMMGAFVAYFLLNNDYLSIGYWPALIVAPIVVGIFGMILERTMLQWLTGLDHLYGLLLTFGIALIVQGVFQNYFGSSGLPYAIPDQLKGGMNLGFMFLPVYRGWVVVFSLIVCLATWYLIEKTRLGAYLRAATENPTLVRAFGINVPRMITLTYGLGVGLAALAGVLSAPINQVRPLMGADLIIVVFAVVVIGGMGSIMGSIITGFALGVIEGLTKYFYPEASNTVVFVLMVLVLLVKPSGLTGRAA

SEQ ID NO: 794 - DNA, 1890 bp, Bradyrhizobium japonicum
  CDS (1)..(1890)
atggccttttatgtcgtacagtttctgaccggtctcgccagcgcagcgtcgctgttcctggtggcctcgggcctgtcgatcatctttggcgtgacgcggatcgtgaatttcgcgcatggcgccttctacatgatcggcgcatacatcgccttcacgctgaccgagcggctttcgggcgcgttcggtttctggggcagtatcgtcgcggccgcgctggccgtggcgctgatcggcgtcatcgtcgagatggtgctgctccgccgcatctatcatgcgcccgaattgttccagctgctcgcgaccttcggtctgaccctgatggtcgaggacctcgtcgtgctgatctgggggcccgacgatctcgtcggccgccgcgcgccgggcttcaagggcgcgatcgatttcttcggccagaacatcccgagctatgacctgttcctgatcgggctcggcccggtcgtgctcggcattctctggctgctgttccagcgcacgcgctggggcgtgctggtgcgcgcggcaacgcaggaccgcgacatggtcgcggctctcggcgtcaatcagaaatggttgttcacgtcggtgttcgcggtcggcgtcttcctcgcagcgctcggcggcgcgctccagatcccgcgcgatgccgtgcatcacgcgatggatctgcgcatcatcgtcgaggtcttcgtcgtggtcgtgatcggcggtctcggcagcatcgtcggcgccttcgtcgcggcggtgctggtctccgagctcaacgccttcggcatcctgatcttcccgaagatctccatcatcctggtcttcctggtgatggcggtggtgctgatcgtccgcccctggggcctgttcggcaagccggaggcggccgcgcgcaagacgccgggtctcaccgtcaatccctggcgcccgctgtcgtcgaacgagcggctggccgcgctggcaacgctcgtcattgccgcaacgctgccgctgttcgccggcaactacgcgctgaccgtcggctcggagatcgcgatcttcgtgatcttcgccgtcagcctgcacttcctgatgtcggtcgggggactcgcgtctttcggccacgccgcctatttcggcctcggcgcctacggcatcgccttcctcgccaagatggccggactgccgatgatcgtctgcctgttgctcgggccgctgctcggctgcatgggcgccgcggtgttcggcttcttcgccgtgcagctctccggcgtctactttgcgatgctgacgctcgcctttgcccagatcgtctggtcgatcgcgttccaatgggtgagcgtcaccggcggcgacaacggcattctgggcgtctggccggaaaaatgggcggcgagcccgtcgcacttctattggctggcgctcggcgtcgcggcgctcgtcacggtcgcgctgcgggccatggtgttctcgccgttcggctacgcgctgcgggccacgcgcgactcgctcctgcgcagcgaagcgatcggtatcaacgccaagcgcatccagtggaccgccttcgtgatcgcgggcacgaccgccggcatcggcggcgcgctgttcgcctatctcaagggcagcgtcttcccggacaatctcggcatctcgctttcggtcgacgcgctggtcatggtgctgctcggcggcgtcgagacggtgtcgggcgcggtgatcggcgccatcgtctacaaggcgctcaacatctggctggtcagccagaccgacctgtcgaagctcgtgctcggcggcttcatcgtgctgatcgtcgtcgtctttcccaagggcatcgtcggcatgctggagatgctggcgcagcgtcgcaggaagacatcgccgccgggatctcccttgcttgccaagccgatcgagtccgccgaatga

SEQ ID NO: 795 - protein, 629 aa, Bradyrhizobium japonicum
MAFYVVQFLTGLASAASLFLVASGLSIIFGVTRIVNFAHGAFYMIGAYIAFTLTERLSGAFGFWGSIVAAALAVALIGVIVEMVLLRRIYHAPELFQLLATFGLTLMVEDLVVLIWGPDDLVGRRAPGFKGAIDFFGQNIPSYDLFLIGLGPVVLGILWLLFQRTRWGVLVRAATQDRDMVAALGVNQKWLFTSVFAVGVFLAALGGALQIPRDAVHHAMDLRIIVEVFVVVVIGGLGSIVGAFVAAVLVSELNAFGILIFPKISIILVFLVMAVVLIVRPWGLFGKPEAAARKTPGLTVNPWRPLSSNERLAALATLVIAATLPLFAGNYALTVGSEIAIFVIFAVSLHFLMSVGGLASFGHAAYFGLGAYGIAFLAKMAGLPMIVCLLLGPLLGCMGAAVFGFFAVQLSGVYFAMLTLAFAQIVWSIAFQWVSVTGGDNGILGVWPEKWAASPSHFYWLALGVAALVTVALRAMVFSPFGYALRATRDSLLRSEAIGINAKRIQWTAFVIAGTTAGIGGALFAYLKGSVFPDNLGISLSVDALVMVLLGGVETVSGAVIGAIVYKALNIWLVSQTDLSKLVLGGFIVLIVVVFPKGIVGMLEMLAQRRRKTSPPGSPLLAKPIESAE

SEQ ID NO: 796 - DNA, 930 bp, Bradyrhizobium japonicum
  CDS (1)..(930)
atgacgcgggcaaatccgcttgcgccatcgcgcggcccaaatccgaaaacggatgacgccatgctcgacatgatcctgtcgcaggccgtcaatggccttgtgctcggctttctctacgttctgatcgcgatcggcctgtcgatcatcttcggcatgctcggcatcgtcaatttcgcgcatggcgccttcttcgccgtcggcgcctatctcgcttatgccctggccaaggagttcggctggtggggggcgcttgccgcgccgctgttgaccggcgcgatcggcgtcgtcgtcgagatggtcctgatccggcacctctatggcaaggaaccgctgctcgggctgatcttgaccttcgcgctcgcactgctggcggaggcggtgttgcggctgatcttcggcggcgcgcccgtgcccttcgctgcgccgaaattcctggccggcttcgtcgaatacggcccgatcctgatcaccaaatacaggatgttcgtgctgctcacgaccgcgctgacgctggtcgcgttctgggcctttctcgcctacacgccttacggccggatcatccgcgccgggtcgcgtgatccggagatggtcggcctactcggcatcaacctgccgatcgtctttagcggcgtgttcggcatgggttgcctgctcgccggcctcggcgggctcttggcggcaccgctctggaccatcacgccgtcgatggcggcgggcgccatcatgccggctttcgtgatcgtcaccatcggcggcctcggctccttcctgggtgccgtcgtggccggcctcctggtcggcatcaccacggcgatgaccatccagttccagccggaatggtcgggcgcagccatgtacatcctgatggccgccattctcctcgtccgcccgcgcggactgttcggcgaacgctgggagagattcgagtga

SEQ ID NO: 797 - protein, 309 aa, Bradyrhizobium japonicum
MTRANPLAPSRGPNPKTDDAMLDMILSQAVNGLVLGFLYVLIAIGLSIIFGMLGIVNFAHGAFFAVGAYLAYALAKEFGWWGALAAPLLTGAIGVVVEMVLIRHLYGKEPLLGLILTFALALLAEAVLRLIFGGAPVPFAAPKFLAGFVEYGPILITKYRMFVLLTTALTLVAFWAFLAYTPYGRIIRAGSRDPEMVGLLGINLPIVFSGVFGMGCLLAGLGGLLAAPLWTITPSMAAGAIMPAFVIVTIGGLGSFLGAVVAGLLVGITTAMTIQFQPEWSGAAMYILMAAILLVRPRGLFGERWERFE

SEQ ID NO: 798 - DNA, 873 bp, Bradyrhizobium japonicum
  CDS (1)..(873)
atgttctacacgatcatagagcaggtcgttaacggcatcgtatcaggatcggtctatgcgatcgttgcggtcggcatgacgatgatttttggcgtgctgcgcgccatcaacttcgcgcatggcgaatactatatgctcggcaccttcggggcctggttcgccatcgaatatttcgacctgccttatccggtagcagtcgtgatcggtgtggttgccaccgccgtcatcgccgtcgtggtcggcaatttcgtgatgcagcggatcgtcggagcgccggccgaggccggcgtgctcgcgaccctcggcgtcgcgctgatcctgcagaacaccgtcatcctggtgttcggtggcagctacaagttcttctccggcggctatatcgagccggtgacgctgttcggtttcacactggccgagcagcgcatcctgatcatcatcgtcagcctcatcgtgttcgtcggcctcgagctgatggtcacctacagccggatgggcaaggcgatgcgcgcggtgtcgcagaacatcgaatgctgcgctgtggtcggtatcgacgtccgtcacatcgcgctctggaccttcatcctcggggctgggttggcggcgctctcgggcgtgttgactgcgcccgtgaacgtcagcgtctacggcggcatgggcgagctcatcaccttcaagacgctgcccatcatcatcatgggcggactcggcaacgtccggggcacgttcgtcgcggcgatgatcctcggtatcgcggagagcctggttgccacctatgtcgggctgcagttccgcgacaccgtgggatttgcgaccctcatgctggtgctgatgtggcgtccgcacgggctcttctccgcgcaggcccgcttctga

SEQ ID NO: 799 - protein, 290 aa, Bradyrhizobium japonicum
MFYTIIEQVVNGIVSGSVYAIVAVGMTMIFGVLRAINFAHGEYYMLGTFGAWFAIEYFDLPYPVAVVIGVVATAVIAVVVGNFVMQRIVGAPAEAGVLATLGVALILQNTVILVFGGSYKFFSGGYIEPVTLFGFTLAEQRILIIIVSLIVFVGLELMVTYSRMGKAMRAVSQNIECCAVVGIDVRHIALWTFILGAGLAALSGVLTAPVNVSVYGGMGELITFKTLPIIIMGGLGNVRGTFVAAMILGIAESLVATYVGLQFRDTVGFATLMLVLMWRPHGLFSAQARF

SEQ ID NO: 800 - DNA, 1044 bp, Bradyrhizobium japonicum
  CDS (1)..(1044)
atgacgagtgacatcgcagccattcttgcgatcgacgggatcgccaccggcgcagtctatgcgctggtggcgatcgggaccgtcctcatcttcacggtgaccagggtcatcttcattcccttcggcgacatcgccgcgttcaccgcgctgacgctggcggccctcgatgcgaagcgctttccgggcacgggggcgctggtggtcatcctggcctgccttgcgaccctgatcgagatcatctcgctggtacgcgccggcgaaacccggctgctgccgcgcgcgctcttgttctacctcgtgcttccggtggccgtggttggcctcgcctggctgacgatgcgcgccgatcctccgctcgccgtcaggctcgtgcttgccttgatgctgatcacgccgatcgctccgctgctggatcggatcgtcttccgccccatcgcggacggaacggtgttgttgctcctgacggtctcggtcgcgctgcatttcgcgctggtgggcctggggctgctgttcttcggacctgaaggcgtcagaaccgaaccgctgacgtcgttgtcggccgagttcgccggcgtgctggtctcgggccagaccatgctgatcgtgatcgcagccctcgtcttcagtggcctgctctttctcttcttcgacttcacgctggtcggaaaatcgctgcgtgccaccgccgtgaaccggaccggctcccgcctgatgggaatacggcccgcccgcgccggcacgatcgcctatctgctgggctcgctgatggccggcgtatcgggcatcctgatcgcaccggtcaacaccgtgttctacgattccggcttcctgatcggcctcaaggccttcgtcggcgccatcgtcggcggcatgaccagctatcccggcgcggcgatcggcgccgtcggcgtcggtattctcgaaagcttcgcatccttcgagagcagcgcgctgaaggacgtcatcgtgttctcgcttctgatcccgatcctgatctggcgatcgctcgcctcgctgcattccgaggaggagatcgaggaatga

SEQ ID NO: 801 - protein, 347 aa, Bradyrhizobium japonicum
MTSDIAAILAIDGIATGAVYALVAIGTVLIFTVTRVIFIPFGDIAAFTALTLAALDAKRFPGTGALVVILACLATLIEIISLVRAGETRLLPRALLFYLVLPVAVVGLAWLTMRADPPLAVRLVLALMLITPIAPLLDRIVFRPIADGTVLLLLTVSVALHFALVGLGLLFFGPEGVRTEPLTSLSAEFAGVLVSGQTMLIVIAALVFSGLLFLFFDFTLVGKSLRATAVNRTGSRLMGIRPARAGTIAYLLGSLMAGVSGILIAPVNTVFYDSGFLIGLKAFVGAIVGGMTSYPGAAIGAVGVGILESFASFESSALKDVIVFSLLIPILIWRSLASLHSEEEIEE

SEQ ID NO: 802 - DNA, 1011 bp, Bradyrhizobium japonicum
  CDS (1)..(1011)
atgagccgtttcatcgaacgccatcccgcctgggcgctgatctcgatcatcgcgatcgccatcgcgctgtggctgatcttcgcagtctggccgccgggcctcgaagaggcaatcgggcgcaagcgcgtcttcctcaacgccgtcttcaacggcatcacgctcggcgggctctacttcctcgtcgcgagcggcttcacgctgatcttcggcctgatgcgcaacgtcaacctggcgcacggctctctctatctgttcggcggctatgtcggctacgccatcagcacagccaccggctcctggctcctcagcttcatcgttgccttcgtcctgactgcactggtcggcgtgctgcttcaggtgatcgtgttccggcgcatggaaggccaggacctcaggcagaccatggtgacgatcgggctctcgatcgtgtttgccgacctgatgctctgggcctgcggcggcgacttctaccagatccagaccccgagctggctgatcgggcccgtggacctgccgctgatcacggcggtgaaatcctcgggcgagccggtctatctccgatatccggtggtgcggctggtgatcttcgcggcgtccgtcgtgatcggcgtcggcatgtggctcgcgctcaaccgcacccggatcggcatgatcatccgcgccggcgtcgacgatcgcgacatgctggccgccaccggcgtgcgcatccagctcgtcttcgtgctggtgttcgcgttcggcgccgggctcgccggcatcgctggcgtcgtcggcggcaccttccagtcgctgtcccccggcgaggacattcgtttcctgctggcctcgctggtggtggtgatcgtcggcggcatgggctcgatccccggtgcggcgctcggtgcgctcatcatcggcctcgccgagcagctcggctcggtctacatcccgacctacgccatcgtcgtgacctttctgatcatggtgctggtgctggcaatccggccgcagggcctcctggcgaggcgctga

SEQ ID NO: 803 - protein, 336 aa, Bradyrhizobium japonicum
MSRFIERHPAWALISIIAIAIALWLIFAVWPPGLEEAIGRKRVFLNAVFNGITLGGLYFLVASGFTLIFGLMRNVNLAHGSLYLFGGYVGYAISTATGSWLLSFIVAFVLTALVGVLLQVIVFRRMEGQDLRQTMVTIGLSIVFADLMLWACGGDFYQIQTPSWLIGPVDLPLITAVKSSGEPVYLRYPVVRLVIFAASVVIGVGMWLALNRTRIGMIIRAGVDDRDMLAATGVRIQLVFVLVFAFGAGLAGIAGVVGGTFQSLSPGEDIRFLLASLVVVIVGGMGSIPGAALGALIIGLAEQLGSVYIPTYAIVVTFLIMVLVLAIRPQGLLARR

SEQ ID NO: 804 - DNA, 1047 bp, Bradyrhizobium japonicum
  CDS (1)..(1047)
atgagaatagccctcaccattctcgccgtcgcggcccttgcctcggtgccgctctggctgcgcgatccctatctcctcaacgcgctgatcacgaccggaatcttcgtcatcggcgcgatgagcctcaatctcctgctcggcttcaccgggcagctcagcctcggccacatcgccttcttcggcatcggcgcctatgtcagcgcgctgacatcgctcggtttcgacatcgggctgcccggagacctgcgccttgttcacacgccgtggccgcccattgtgggcttcgtgctcgcgatcctcatcgccgggctgtgcggttatttcgtcgggctgctctcgttccgcgttcgcggcgcctatttcgtcattgtcacgatctccttcgccgaagtcgtgcggctcgtcgcgctgaactgggtcgagttgacgcaaggccctctggcgctgaccaacattccctccatcgcgctgccgttgcccggcctcagtgagctgacgctgcgcaccaagatgcagaactactatctcgtgctggtcgtggctctcatcgcctatctcctgatcgcgcgtctcgttcattcccatttcggccgcgcgatgcgcggattgatggagaatgagacgctcgcggtctccgtcggtatcgacgtgaccaagacgctgacgctggcggcggtgatttccgccgcgatcgctggcgccgccggcagcctctatgcgcactatatccggatcatcgatccggaagtgtttgccttcatcaacaccgtcaccatggtgatcatggtcatcagtggcggcaagggctcgctggcggggcccgtcgtcggcggcctgatcttcgggctgctgccagtcgcgctgcgtccgatcatggcgccggaggcgcaatggatcgcctatggcggcgtgctgatcgccatcctgttcgtgctgccgcgcggcatcgtgccctcgctcgcgcagcgatttcgcaggagacggagcggcacgacggcgctggcgccggtggccctcgccgagacagcggtcaaggagcgggcgtga

SEQ ID NO: 805 - protein, 348 aa, Bradyrhizobium japonicum
MRIALTILAVAALASVPLWLRDPYLLNALITTGIFVIGAMSLNLLLGFTGQLSLGHIAFFGIGAYVSALTSLGFDIGLPGDLRLVHTPWPPIVGFVLAILIAGLCGYFVGLLSFRVRGAYFVIVTISFAEVVRLVALNWVELTQGPLALTNIPSIALPLPGLSELTLRTKMQNYYLVLVVALIAYLLIARLVHSHFGRAMRGLMENETLAVSVGIDVTKTLTLAAVISAAIAGAAGSLYAHYIRIIDPEVFAFINTVTMVIMVISGGKGSLAGPVVGGLIFGLLPVALRPIMAPEAQWIAYGGVLIAILFVLPRGIVPSLAQRFRRRRSGTTALAPVALAETAVKERA

SEQ ID NO: 806 - DNA, 903 bp, Bradyrhizobium japonicum
  CDS (1)..(903)
atggatctcgacgcgctcgccggctgcctctccagctccgcctgcctggtgacgcaaaccaccagcggcctcatcatcggcatgctgctgtttctggtcgcggtcgggctgacgctgatcttcggtgtgctcaaggtcgtcaatttcagccacggcgccttctatatgttcggcgcctattttgcgatgacggcctatcatctcaccgacagctttgcgctggcgatgctggcgggtgcgggcggcaccgccatcctcggcctgatcttcgagcgcgtcttcatgagccgcgtctatggcgccgacgtcttgatgcagctcctcgtctgctacgccttcgtgctgatcttcgatgatgtcgtgcgcatcatctggggccccgagttcaagtcgatgggcatgcctgcggcgttccaggtgatgccgctgttcatcgccggcggcgtggtgccgccttattacctgctgctgatcggcgtcgcgctcgtcgcggccatcgtgctcggcattgggctgtcgcgcagccgcattggcaaggtgatccgcgccgccgcgcacaatcccggcatggtgtcggcgctcggcatcaacaccggcctgatctatggcggcgtgttcgcgctcggcggcatgctggcggggctggctggtgcacttgccgcgccggtgcgctcgctcacccccggcatgggattctcggtgctgatcgaatccttcatcgtcaccgtgatcggcggcatgggctcgatcctgggcgcactgatcggcgcgctgctgatcggcctgatccgctcgttcggctcgctcggctttcccctgttcacggaaggtctgatgtacctgttcatggtgatcgtgctggtctccaagcccaccggcctgttcggcaaggaggcggcatga

SEQ ID NO: 807 - protein, 300 aa, Bradyrhizobium japonicum
MDLDALAGCLSSSACLVTQTTSGLIIGMLLFLVAVGLTLIFGVLKVVNFSHGAFYMFGAYFAMTAYHLTDSFALAMLAGAGGTAILGLIFERVFMSRVYGADVLMQLLVCYAFVLIFDDVVRIIWGPEFKSMGMPAAFQVMPLFIAGGVVPPYYLLLIGVALVAAIVLGIGLSRSRIGKVIRAAAHNPGMVSALGINTGLIYGGVFALGGMLAGLAGALAAPVRSLTPGMGFSVLIESFIVTVIGGMGSILGALIGALLIGLIRSFGSLGFPLFTEGLMYLFMVIVLVSKPTGLFGKEAA

SEQ ID NO: 808 - DNA, 906 bp, Bradyrhizobium japonicum
  CDS (1)..(906)
atgagggcgtattgtgggggacgacttttgacagctcaagccattatccagagtctcgcgagcggcctgctcatgggcctgctctacggactgatcgccgtcggcctcgcgctgatcttcggcctgatggacgtcgtgaacttcgcccatggcgagttcctgatgatcgcgatgtatgtgagcttcttcctgttcgcgttcttcgccatcgaccccctgctgtcggcgccgctggtcgccgcggccctgttcgtgttcggggcggtcgtctacctcttgattgtacgcttcgcgatgcgcgccaaggcaaacgccggcatggtgcagatcttctcgaccttcggccttgccatcgtgatgcgcgggctcgcgcagttcttcttcacgccggactatcgcagcattccgcagtcctggctcggcggcaagacgatctcgatcggcggcatcttcctgccggagccgcagttgatcggcgcgctggtctcgatcgcggctttcgccggcctctatttcttcatcaaccgcactgacttcggccgcgcgctcgaagccacccgcgaagatcccggtgcagtcgcactcgtcggcatcgacaagaaccgcgtgttcgcgctgggctggggcctgggcgccgcactggtcggtctcgccggcgcgatcatggcggtgttcttctacatctatccggacgtcggcgcctccttcgcgctgatcgcctatgtcacggttgcgctcggtggtttcggcagtgtgttcggcgcgttcgccggcggcatcatcgtcggcctcgtcgaggcgaccaccgccctggtgctgccgccttcgctgaaatcggtcggcatctacgcggtctatctgctcgtcgtcttcatccggccgcgcggcctgttcggatcgatgtga

SEQ ID NO: 809 - protein, 301 aa, Bradyrhizobium japonicum
MRAYCGGRLLTAQAIIQSLASGLLMGLLYGLIAVGLALIFGLMDVVNFAHGEFLMIAMYVSFFLFAFFAIDPLLSAPLVAAALFVFGAVVYLLIVRFAMRAKANAGMVQIFSTFGLAIVMRGLAQFFFTPDYRSIPQSWLGGKTISIGGIFLPEPQLIGALVSIAAFAGLYFFINRTDFGRALEATREDPGAVALVGIDKNRVFALGWGLGAALVGLAGAIMAVFFYIYPDVGASFALIAYVTVALGGFGSVFGAFAGGIIVGLVEATTALVLPPSLKSVGIYAVYLLVVFIRPRGLFGSM

SEQ ID NO: 810 - DNA, 1170 bp, Bradyrhizobium japonicum
  CDS (1)..(1170)
atgacccctcacatgctgacgcgatcactggaccgcagcgcgacgatcttcctgctggttgtcgccgcgctgggcgtgctgatcccgttgtccaacctgctgctgcccgcgggctcgttcctgcaagtgccgacctatctggtcgcgctctggggcaagtatgtctgttacgccatcctggcgctcgcgatcgacctgatctggggctattgcggcatcctctcgctcggccacggcgctttcttcgcgctcggcggctacgcgatgggcatgtacctgatgcggcagatcggcacccgcggcgtctacggcaacccgatcctgcccgacttcatggtgttcctgaactattcgaagctgccctggtactggtacggcttcgacatgttctggttcgccgcgctgatggtgctggtcgtgccgggcctgctcgccttctgcttcggctggctcgccttccgctcccgcgtcaccggcgtgtatctgtcgatcatcacgcaggcgatgacctatgcgctgctgctcgccttcttccgcaacgatttcggcttcggcggcaacaacggcctgaccgacttcaaggacattttgggcttcaacgtgcaggcggaagggactcgcgccgcgctgttcgcgctgagctgcctggcgctgatcctgggcttcctggtctgccgcgccatcgtctcgtccaagctcggcaaggtgctgatcgcggtgcgtgatgcggaatcgcgcacccgcttcctcggctaccgggtcgaatcctacaagctgttcgtgttcacggtgtcggcctgcatggccggcgttgccggcgcgctctacgtgccgcaggtcggcatcatcaatccgagcgaattcgcgccgggcaattcgatcgaggcggtgatctgggtcgcggtcggcggccgcggcacgctggtcggcgcggcgctcggcgccgtcgtcgtcaactatgccaagacgttcttcacctctggcatgctggcgccgtactggctgttcatgctcggcgcgctgttcatcctggtgacgctgctgctgcccaagggcatcgtcggcaccttcaacacctggtgggacgcgtcgaaggaaaaacgtcccgcggcgaccacggcgagtgccgcggccgaggacggcgtcaccgaaccaaagatggcggagtag

SEQ ID NO: 811 - protein, 389 aa, Bradyrhizobium japonicum
MTPHMLTRSLDRSATIFLLVVAALGVLIPLSNLLLPAGSFLQVPTYLVALWGKYVCYAILALAIDLIWGYCGILSLGHGAFFALGGYAMGMYLMRQIGTRGVYGNPILPDFMVFLNYSKLPWYWYGFDMFWFAALMVLVVPGLLAFCFGWLAFRSRVTGVYLSIITQAMTYALLLAFFRNDFGFGGNNGLTDFKDILGFNVQAEGTRAALFALSCLALILGFLVCRAIVSSKLGKVLIAVRDAESRTRFLGYRVESYKLFVFTVSACMAGVAGALYVPQVGIINPSEFAPGNSIEAVIWVAVGGRGTLVGAALGAVVVNYAKTFFTSGMLAPYWLFMLGALFILVTLLLPKGIVGTFNTWWDASKEKRPAATTASAAAEDGVTEPKMAE

SEQ ID NO: 812 - DNA, 1608 bp, Bradyrhizobium japonicum
  CDS (1)..(1608)
atgccagctaatttgtccgcccgcctctgttcgctcctgctctcgttgttcctgatcgcgttcgcactgccggccttcgccggtccgttcgaggatgcggtcgccaaattcgccaacgatgattattccgacacggaagaggcgatcggcgtggtcgcgagcagcggcaatccgctggccttccccatcatcagcgcgctccaggacggccgcctcatggccgatccggacagcaagaaggtttacgtcaccggcaccgacggcaagtcgatcgatgtcgcgaccggccaggcggtggccagcgttcccgacagtgcgagcgcggtccgcctcaacaaccgtcttcgccgcagcgtcgatgccgcggtcggcagcctgacgcttcagtcgccggacgtcggaacgcgcctccaggccgcgcaatccgtcttcaagtcgcatgaggagaccgcgctcgaagccgtcgatgccgcgctcgccaaggaaaccaacaaatcagtcaaggctacgctcggcgaagcccgcgcggcgatcctgctgttcaagccggacgccaccgaggtcgagaagctcgaggccgtcgccaccctcagggcgcgcggcgaccaggaggcgatggcgctgctcaccggcatgggcgaccagccggcctcggtgaccaaggccgccgcgagtgcgatcggctcgatccagagttcgctcgcggtctggtccacggtgcagaatgcctggtacggcctctcgctcggctcagtgctgctgctcgcggcgatcgggcttgccatcaccttcggcgtgatgggcgtcatcaacatggcccacggcgaaatggtgatgttaggggcctacaccaccttcgtggtgcaggaggtgatccgcacccgctatcccggcctgttcgactattccttgctgatcgccgtgccgctggcctttctcgtcgccggcgcgatcggcgtgttgatcgagcgcagcatcattcgcttcctctacggccgtccgctggagacgctgctggcgacctggggcctgtcgctggtgctccagcaggcggtccgcaccatgttcggcccgaccaaccgcgaggtcggcaacccctcctggatgagcggcgccttcgagctcggccagatcaccattacctataaccggctctggatcctctgcttcacgctcgccgtgttcgcgatcctgctcgcgatgctgcgctacaccgcgctgggcctggagatgcgcgcggtgacgcagaaccggcgcatggcggcctcgatgggcatcgccacctcgcgcgtcgacgcgctcaccttcggcctgggttcgggcattgccggcatcgccggcgtggcgctgtcgcagatcgacaatgtcagtcccaatctcggccagagctacatcatcgacagcttcatggtcgtggtgttcggcggggtcggcaatctctggggcacgctggtcggcgccttcacgctcggcatcgccaacaagttcctggagccggtcgcaggcgccgtgctcggcaagatcgccatcctggttctcatcatccttttcattcaaaagcggccgcgcggtctgttcgcgctcaagggccgtgcggtggaagcatga

SEQ ID NO: 813 - protein, 535 aa, Bradyrhizobium japonicum
MPANLSARLCSLLLSLFLIAFALPAFAGPFEDAVAKFANDDYSDTEEAIGVVASSGNPLAFPIISALQDGRLMADPDSKKVYVTGTDGKSIDVATGQAVASVPDSASAVRLNNRLRRSVDAAVGSLTLQSPDVGTRLQAAQSVFKSHEETALEAVDAALAKETNKSVKATLGEARAAILLFKPDATEVEKLEAVATLRARGDQEAMALLTGMGDQPASVTKAAASAIGSIQSSLAVWSTVQNAWYGLSLGSVLLLAAIGLAITFGVMGVINMAHGEMVMLGAYTTFVVQEVIRTRYPGLFDYSLLIAVPLAFLVAGAIGVLIERSIIRFLYGRPLETLLATWGLSLVLQQAVRTMFGPTNREVGNPSWMSGAFELGQITITYNRLWILCFTLAVFAILLAMLRYTALGLEMRAVTQNRRMAASMGIATSRVDALTFGLGSGIAGIAGVALSQIDNVSPNLGQSYIIDSFMVVVFGGVGNLWGTLVGAFTLGIANKFLEPVAGAVLGKIAILVLIILFIQKRPRGLFALKGRAVEA

SEQ ID NO: 814 - DNA, 876 bp, Bradyrhizobium japonicum
  CDS (1)..(876)
atgtccaatctgttcgatcttctggtcgcaggacttgccaccggcgccatctatgcactggtcgcggtcggcttcacgctgctgtggcagacctcgcagaccatcaatttcgcgcagggcgagttcgtgatgctgccggcgttcctgatgctcgcgacgatgcatgttggcgcgccgttctggctcgcgatcatcctcggcatcctgctctcgatgatcctgctcggcctcgccttcaagatgctgctggtcgatccgatgatgcgccatggcgtgctgccgctggcgatcgcgaccatggcgctggcgatcggcatcaaggaatcggtgaagcagttcttcagcgcggaggcctcgcccttcccctcgatcgtgccgaccggcgatatctccatcctcggccacgccgtctcgctgcaaagcatcggcgtcctcgtcgtcgccattcttgcagtcttcggcctgacctcgctcctcaaccgcacctcgctcggccaccagatgcaggcggccgcccagaatccgacggtggcgcgcatcatcggcgtgcccgtggagcgcatgatcctgttgaccttcctgatcaacgccttcctggtcgcgctggcctcgctgctgatcacgccgatttacctcgcgaaattctcgtccggcgaggtgctgggccaggccgccttcatcgcggcgatcgtcggcggcttcaaccaggtgcgcggcgcgatcgcgggcggcctgttgatcggcgtgctcgacaatctcgcggcaagctacgtctcgacgcaataccgcgcggccgtgccgctgatcttcctgatcgtcgtcatcctgttccggccgcaaggactgctcggccgcgccgaggagcgcacggtatga

SEQ ID NO: 815 - protein, 291 aa, Bradyrhizobium japonicum
MSNLFDLLVAGLATGAIYALVAVGFTLLWQTSQTINFAQGEFVMLPAFLMLATMHVGAPFWLAIILGILLSMILLGLAFKMLLVDPMMRHGVLPLAIATMALAIGIKESVKQFFSAEASPFPSIVPTGDISILGHAVSLQSIGVLVVAILAVFGLTSLLNRTSLGHQMQAAAQNPTVARIIGVPVERMILLTFLINAFLVALASLLITPIYLAKFSSGEVLGQAAFIAAIVGGFNQVRGAIAGGLLIGVLDNLAASYVSTQYRAAVPLIFLIVVILFRPQGLLGRAEERTV

SEQ ID NO: 816 - DNA, 1011 bp, Bradyrhizobium japonicum
  CDS (1)..(1011)
atgacagaacttgccgcaaacgatccgctgccgaagccgaagcgcgacatcgcgccgatcctgctgccgatcgcgctcgccctcctggtgatcccgctggtcggctcgcccagcacctggctgacgctgaccgccgcgagcctcgccatgggcatgatgatcttcatcatggcctccgggctgacgctggtgttcggcctgatggacgtgctcaatttcggtcatggcgccttcatcgccgtcggcgcctatgtcgcaaccctggtgctggcaccgtttgcggcgtccattcaggccgattcgctctggatgaacctcgcggtgctggcgccggctgcgctgctgtcgatggcggtgtccggcgcgctcggcctggtcgtcgagcgcgtgctgatcctgccggtctacggccagcatctgaagcagatcctgatgacgaccggcggcctgatcgtcgccgagcagacgctctatgcgctgtgggggccgcagatcatcccgatgccgctgcccacctcgctgcgcggctccttcatcctcggcgacgtcgcgatcgccaagtaccgcgtgctggcgacgctgatcggccttgccgtcttcatcgcgatccagctcgtgctcaaccgcaccaagctcggcctgctgatccgcgccggggtcgagaaccgcgagatggtcgaggcgctcggctatcgcatccgccgcctgttcctcggcgtgttcatgacgggctccgcgctcgcaggcctcggcggagtgatgtgggcgctctatcgcgagcaggtccacgcctccatgagcgacgacctcaccgtgctgatcttcatcgtcgtcatcatcggcggcctcgggtcgatcggcggctgcttcatcggcgcgatcctggtggcgatggtcgccaattacggcggcttcctggtgccgaaactcgccctcgtctccaacatcctgctgatggtcgccattctgatgtggcggccgcgcggcctctatgcggtgaccagccgatga

SEQ ID NO: 817 - protein, 336 aa, Bradyrhizobium japonicum
MTELAANDPLPKPKRDIAPILLPIALALLVIPLVGSPSTWLTLTAASLAMGMMIFIMASGLTLVFGLMDVLNFGHGAFIAVGAYVATLVLAPFAASIQADSLWMNLAVLAPAALLSMAVSGALGLVVERVLILPVYGQHLKQILMTTGGLIVAEQTLYALWGPQIIPMPLPTSLRGSFILGDVAIAKYRVLATLIGLAVFIAIQLVLNRTKLGLLIRAGVENREMVEALGYRIRRLFLGVFMTGSALAGLGGVMWALYREQVHASMSDDLTVLIFIVVIIGGLGSIGGCFIGAILVAMVANYGGFLVPKLALVSNILLMVAILMWRPRGLYAVTSR

SEQ ID NO: 818 - DNA, 858 bp, Bradyrhizobium japonicum
  CDS (1)..(858)
atggctaacgcgttcgtcgcggcgttcgagatcctgagctttggcgcgatcatcgtcctgatcgtgctggggctcgggatcatcgccagcatgatgggcatcttcaacttcgcgcaaggagagttcgtcctgctcggggcctacatcacctatctcgcctacgccgggggcctgccgatctgggccggcatggtcgcggcgcccttcgtggtcggcgcgctcggctttgtgctggaggcgctgatcatccgccgcttctacgccgcgccgatcgtggcgatgctcggcacctatgcgctcggcctgatcatccgcgaatccgtgcgcggcctgatcggcggcttctatctcaccgtgcccgagccgatcggcggctcgatcgacatcggcgcgatgcacatctcggcatggcgcttcaccatcatcgtcatcacgctgctggtgatgggtggctgctatctcctgctctctcgcacgagcttcggcctgcgcgtccgcgccacgctggaaaatccctcgctggcgcgcgcctccggcatctccacgccgctgatctatggcgccacctttgccttcggcgcggcgctcgccggccttgccggcgcgctgatcgtgcctgtcttcagcctgttcgccgatctcggcctgcgcttcctgatccagggctttgtcgcggtcatggtcggcggcgtcggctccttcatcgggccggtggcgggtgccggcgtcatcggcacgctgagtgccgcgctgccctgggtgatggcgcccgtcgtcgccgacgtcctcgtctttgtgctcgccattatcttcatcaaattccggccgcagggcctcatcgctggcaaaggggtttag

SEQ ID NO: 819 - protein, 285 aa, Bradyrhizobium japonicum
MANAFVAAFEILSFGAIIVLIVLGLGIIASMMGIFNFAQGEFVLLGAYITYLAYAGGLPIWAGMVAAPFVVGALGFVLEALIIRRFYAAPIVAMLGTYALGLIIRESVRGLIGGFYLTVPEPIGGSIDIGAMHISAWRFTIIVITLLVMGGCYLLLSRTSFGLRVRATLENPSLARASGISTPLIYGATFAFGAALAGLAGALIVPVFSLFADLGLRFLIQGFVAVMVGGVGSFIGPVAGAGVIGTLSAALPWVMAPVVADVLVFVLAIIFIKFRPQGLIAGKGV

SEQ ID NO: 820 - DNA, 1617 bp, Yersinia pestis
  CDS (1)..(1617)
atgatgagtgggcctatgaaatcgttaattcctgtttggaatagggcaatcaattatgtgttcaggccgatgataggtctgttactgggcttatcgatgtcggcaatggcagggccagcacaggattttgttgcggcgaatcgtgcacagcaggccacattattacaacagtgggcaacggaacctgatgctagccgattacctcttttgcaggcgctaaaacaagaaacagtagtggtagacagtgccggccaagcgtttattaaaaataatcaaagtattaattcgctggaaggccaatcgcaaccgaccggtacgctgaaaaaaatctggctcaacaaccggttacgtatcttgatcgccaatgccctggcggcacaacgcttagtcagtgacgatgaaaccgtgcgtttacaggcggcagttgaattacaacggcaggcacagagcgatcaactaccgctgctgaatcaacgcctgaagttggaaacggacagtcaggtcaaagaggcattgagcattgcactcgccaatttacaactgacggacagtaatccgcaggtgcgtctgaatgccgtgcaattgttggggcaatcaggttcaccgcaaactcaatcacggctgcaaagtttaaccgatacgcaggttgaaccgaatgaacaggtccgagccgcagcagccaccagtttgaaacagatacaacatcggttgatgattggggaggttattgggcaggtatttagcggactatcattgggttcaatcttactgctggcggcattggggttagctatcacctatggcttactgggggtgatcaatatggcgcatggtgaaatgctgatgttgggagcctattccgcctatctggtgcaatcgctattccaacaatttgccccacactggctggcactttatccattaatcgctctaccggttgcgttctttattactgcgggcattggtatggcgttggaacgcacggtgattcggcatctgtatggccgcccgttggaaacactgctagcgacgtgggggatcagcctgatgttgattcaggggatccgcatgttgtttggcccacagaatttggaagttgctaaccctgcatggctgtccggtggggttcaggttttacctaatctggttttaccgtggaatcggatcgcggtgattgcatttgtcattattgttttgctactcacatggttgctgctgaataaaacccgccttggtctgcaagtccgtgcagtgacacaaaatcgggcaatggcggcctgctgcggagtggctacggggcgggttgatatgctggcattcggtttgggttctggtattgcagggcttggcggtgtagcactctcgcaattgggcaatgtcggcccggaattagggcagggttatatcatcgactccttcttggtggtggtcctaggtggcgtcgggcaattagctggcagtgtggttgccgcattaggtctggggatgttgaataaaattttggaaccacaaattggcgcagtattgggcaaaatcctgattttagtgctgatcattttatttattcaaaaacgaccgcagggtctgtttgcccttaagggcagggtgagtgactaa

SEQ ID NO: 821 - protein, 538 aa, Yersinia pestis
MMSGPMKSLIPVWNRAINYVFRPMIGLLLGLSMSAMAGPAQDFVAANRAQQATLLQQWATEPDASRLPLLQALKQETVVVDSAGQAFIKNNQSINSLEGQSQPTGTLKKIWLNNRLRILIANALAAQRLVSDDETVRLQAAVELQRQAQSDQLPLLNQRLKLETDSQVKEALSIALANLQLTDSNPQVRLNAVQLLGQSGSPQTQSRLQSLTDTQVEPNEQVRAAAATSLKQIQHRLMIGEVIGQVFSGLSLGSILLLAALGLAITYGLLGVINMAHGEMLMLGAYSAYLVQSLFQQFAPHWLALYPLIALPVAFFITAGIGMALERTVIRHLYGRPLETLLATWGISLMLIQGIRMLFGPQNLEVANPAWLSGGVQVLPNLVLPWNRIAVIAFVIIVLLLTWLLLNKTRLGLQVRAVTQNRAMAACCGVATGRVDMLAFGLGSGIAGLGGVALSQLGNVGPELGQGYIIDSFLVVVLGGVGQLAGSVVAALGLGMLNKILEPQIGAVLGKILILVLIILFIQKRPQGLFALKGRVSD

SEQ ID NO: 822 - DNA, 936 bp, Synechococcus elongatus
  CDS (1)..(936)
atggtaaccaacgccttgcaagtccttgtggatggactagccacagggagtgtttatgccatttttgccctcggctatacccttgtcttctcgattttgggcatcattaactttgctcacggcgctgtttttgcccttggggcttatctcacctatgccctcttgggaggacgctttggctttaatggcctgttggccaatgggcagcttcccgttgccttgccctttgccccggccttggccttgagtgcccttggctgtgggctgttgggggtgggcattgactggattgtctttcgaccgttgcggcagcagggcaccgataccctcttgacggtggtggccagtcttggcgctgccgttttcctcaccaacttgatccagtatttagtgggtgccgaagtctatacctatcccgatcaactctggggtggattgccccttaccctgcaatggggggacattaccctgcgcactagccaattgattatctttgccgtggccgtggttttgatgattgccctgacctattgggtgaaagggacgcgcatggggaaaggattgcaggccgtggctgaaaatccaactgccgccacattgctgggcattgatggcgatcgcattattcaagtgacattttttgttagcagtgctttggctgctgttgctggcaccctcatcgccttgagtgttgggattacaggaccacagtttggggtgatctttggcctcaaggggttagcggtgattgttctggggggcctcggcagtttaccagggacaatgttggccggctttttgctgggattggtggaggcaatggtgcctgcggctgcttcggggtttcgcgatgctgctgcctttgccatccttttcctagtgctgctggcgcgcccccaagggctcttgggtcagccccccgttgaaaaagtctag

SEQ ID NO: 823 - protein, 311 aa, Synechococcus elongatus
MVTNALQVLVDGLATGSVYAIFALGYTLVFSILGIINFAHGAVFALGAYLTYALLGGRFGFNGLLANGQLPVALPFAPALALSALGCGLLGVGIDWIVFRPLRQQGTDTLLTVVASLGAAVFLTNLIQYLVGAEVYTYPDQLWGGLPLTLQWGDITLRTSQLIIFAVAVVLMIALTYWVKGTRMGKGLQAVAENPTAATLLGIDGDRIIQVTFFVSSALAAVAGTLIALSVGITGPQFGVIFGLKGLAVIVLGGLGSLPGTMLAGFLLGLVEAMVPAAASGFRDAAAFAILFLVLLARPQGLLGQPPVEKV

SEQ ID NO: 824 - DNA, 870 bp, Synechococcus elongatus
  CDS (1)..(870)
atggatattcaactgattcaacttttcgttaatggcttggcggtggggagtattattgcccttgcagccgtgggtttaacgctcacctttggcattttgcgcctgcccaactttgcccatggtgatttcatgacggcgggagcctacctgacgttggtggccaatgcaacaggactgaatatttggctctcaatggcgattgggggcttggggacggccgggttgatgctcctaagtgagaagctcctgtggcagccgatgcgcgatcgccgcgcaacctcaacaactctgattattatttccatcggtctgtcattcctgctgcgcaatgctgtgatcctcatttggggcagtgaaaaccaaacctatcggctacccgtcatccctgcccttgatgttggcggggtgaaaattatttactcgaaggtgattgtaatgattttggcggtggtagcgatcgccactgtgcatttgatcctccaacgcaccaaggtaggcaaggccatgcgagccgtagctgatgatctcgacttggcgcgggtttccgggattgatgtcgagtgggtggtgctgtgcacttggcttttggcaggggtactcacaggggtggcggggggtctctatggcctgattaccgctgtgcggccaacgatgggttggtttttgatcttgcccctctttgccagtgtgattctgggtggcattggtaacccctacggggcgatcgccggcgccctgatcattggtgttgcccaagagatgagtacacggatgatccctgctgaatacaagctggctgttgccctagggatgatgatggcagtgcttttagtgcgcccccaagggctatttcgtggcaccctcagctag

SEQ ID NO: 825 - protein, 289 aa, Synechococcus elongatus
MDIQLIQLFVNGLAVGSIIALAAVGLTLTFGILRLPNFAHGDFMTAGAYLTLVANATGLNIWLSMAIGGLGTAGLMLLSEKLLWQPMRDRRATSTTLIIISIGLSFLLRNAVILIWGSENQTYRLPVIPALDVGGVKIIYSKVIVMILAVVAIATVHLILQRTKVGKAMRAVADDLDLARVSGIDVEWVVLCTWLLAGVLTGVAGGLYGLITAVRPTMGWFLILPLFASVILGGIGNPYGAIAGALIIGVAQEMSTRMIPAEYKLAVALGMMMAVLLVRPQGLFRGTLS

SEQ ID NO: 826 - DNA, 1170 bp, Synechococcus elongatus
  CDS (1)..(1170)
atgcctaagctatcgcagttttcttttcccaaagatcgcctcagtggccgcgagttaatggtggtggctgcccttgctctaatcctgattttcgtgatgccatctctgttgccggggtttcgcttggatttactgcaccgctatctggctctggcgattgtggctttgggaatagatctgatttggggttttacgggattgcttagccttggccatggcattttctttgccttgggggggtacgcgatcgccatgcatttaaaactacaggtacccgccactgcctctagctccctaccagattttatgtccctctatggtgtcacggagttgccgtggttttggtatcccttctattcctttacctttgctgttgcagcagtggtgctgatcccagccctattgggggcactcttggggtaccttgtctttcgcaaccggatccgtggggtctatttctctatccttactcaagcggccattatcgtcttttataacttctttaatggtcagcaaaagctctttaacggcaccaatggcctgacagattttcaaaccctgctggggttccctgtacgcaatgcccagacccagtattggttctatgtcctaacagtgattttcttggccttggcgtatcttctctgccgttggctgacaatgggacgctttggccgcctactggtcgccatccgcgatgatgaagcccgtgtccgtttctcgggatacaacccgaccagctataaggtactcgtttttgccatttccgctgccttagcaggaatcggtggcgccttctttactttgcgcaccggcatcatttcaccacgggcgatggacattgccttctcaattgagatggtgatctgggtggcggttggcggtcgtgccagcctcattggagctgtcctgggagcactcttggtcaactttgctcgcagtctgttgagtgagcagtttgccgatatttggctctttttccaaggggccctgtttttaattgtggtgttggcactccctacgggaattgttggctggctgcgcactgaagcccccaacctgattgcgaaactcttggggcgaccacaacccctggcaacatatccagagttggagtttgatcccgaggtgcaatatgagcgtgaagttctcgaacaggagggcaaataa

SEQ ID NO: 827 - protein, 389 aa, Synechococcus elongatus
MPKLSQFSFPKDRLSGRELMVVAALALILIFVMPSLLPGFRLDLLHRYLALAIVALGIDLIWGFTGLLSLGHGIFFALGGYAIAMHLKLQVPATASSSLPDFMSLYGVTELPWFWYPFYSFTFAVAAVVLIPALLGALLGYLVFRNRIRGVYFSILTQAAIIVFYNFFNGQQKLFNGTNGLTDFQTLLGFPVRNAQTQYWFYVLTVIFLALAYLLCRWLTMGRFGRLLVAIRDDEARVRFSGYNPTSYKVLVFAISAALAGIGGAFFTLRTGIISPRAMDIAFSIEMVIWVAVGGRASLIGAVLGALLVNFARSLLSEQFADIWLFFQGALFLIVVLALPTGIVGWLRTEAPNLIAKLLGRPQPLATYPELEFDPEVQYEREVLEQEGK

SEQ ID NO: 828 - DNA, 1158 bp, Synechococcus elongatus
  CDS (1)..(1158)
atgacttttttgctagaaagtgtcttcaatggcatgagtattggtgcggtgttgctgttaaccgcactagggctggcgattgtctttggtattatgggcgtgattaaccttgcccacggtgaactgatgatgctgggagcctacactaccttcgtggtacaaaatggcttccgtcaattgggagagggttggtttgatacttatctattaatagcagtgcccttagcctttgccgtggcagcggggatcggtctcgttcttgagcggggagtcattcgctatctctatggtcgccccctcgaaaccctcttggccacttggggcgtgagtttgatcctgcaacagttggtgcgcagtattagttggcagatgactctgcaaatcgccctcttttgcctgctcttctttggtggccgctggctcctctccaagcggacgatcgctcctcgttggcaggcttgggtaacgccactgttactgacgctctctgtcggaattgccctgacagcgggcctcgtggctgggagcgcggtgggtctggcaatgacaaagccctggtttggtgctcagggggtggatgtgactgctcctagttggctgcggggaggggtaagtgtctgggggatgcagtttcccttggtgcgcctctttattattgccctgacagcagtgtgtttggtggcaatttacctctttcttctgcgatctcaatggggtctacggattcgcgccgtgactcaaaaccgcagtatgagtgcctgcatggggattcccacccaaacggttgatgccctcacctttgcccttggctctggtttggcgggggtagcaggctgtgccattagcctcttgggttctgtaagtccgaatacgggtcagaactacattgttgaagccttcatggttgttgttgtggggggggtcggcaaaattgtcggttcaattgtggctgcccttggcattggctttgtcaactacgtcatcggttcggggttgatgacccgctttcttgaaccgcaaacagcagtgtttgacttctttgaattttttgccagtaccagcatggcacgggtgatggtcttcatcctcatcattgctttcctgcaactgcgtcccgctggtctttttccacaaaaaggacggacggtcgatgcctaa

SEQ ID NO: 829 - protein, 385 aa, Synechococcus elongatus
MTFLLESVFNGMSIGAVLLLTALGLAIVFGIMGVINLAHGELMMLGAYTTFVVQNGFRQLGEGWFDTYLLIAVPLAFAVAAGIGLVLERGVIRYLYGRPLETLLATWGVSLILQQLVRSISWQMTLQIALFCLLFFGGRWLLSKRTIAPRWQAWVTPLLLTLSVGIALTAGLVAGSAVGLAMTKPWFGAQGVDVTAPSWLRGGVSVWGMQFPLVRLFIIALTAVCLVAIYLFLLRSQWGLRIRAVTQNRSMSACMGIPTQTVDALTFALGSGLAGVAGCAISLLGSVSPNTGQNYIVEAFMVVVVGGVGKIVGSIVAALGIGFVNYVIGSGLMTRFLEPQTAVFDFFEFFASTSMARVMVFILIIAFLQLRPAGLFPQKGRTVDA

SEQ ID NO: 830 - DNA, 870 bp, Streptococcus mutans
  CDS (1)..(870)
atgctccaacaacttattaatggtcttatcctagggagtgtctatgctctgttagcccttggttataccatggtttatggaattattaagttaattaactttgcccatggagatatttatatgatgggagcctttattggttattttcttattacaaaatatcatatgaatttctttgtggctcttgtgctgacgatggtcttaacagctatcttaggggttgtgattgaatttctggcttatcgtcctttgcggaattcgacacgtatcgctgctttgattactgccattggtgtttctttttttctcgaatacagtatggttcgtttagttggtgccaataaacatgcttttccccaaacccttgctacagtgaaatataatttaggtcctgttagtgtaaccaatgtacaactcatcattttaggagtctctatcttcttgatgttggctttgcagtttattgtccaaaaaactaaaatgggtaaagccatgcgtgccgtttcagttgacagtgatgctgcgcagttaatgggaatcaatgttaatagtactattagttttacctttgctttaggttctgcacttgctggtgctggtggtgtcttgattggactttattataattctgttgatccactgatgggaatggttcccggtattaaagcctttgtcgccgctgttttaggcggtattggtattattccaggtgcagctgtcgggggctttatgattggtcttttagagacgttttctgtttctatcggtcttgcaagttacaaggatgcagttgtctatgcagtgcttatcattatccttttagtaagaccagctggtattttaggaaaaaatgtgaaagagaaggtgtaa

SEQ ID NO: 831 - protein, 289 aa, Streptococcus mutans
MLQQLINGLILGSVYALLALGYTMVYGIIKLINFAHGDIYMMGAFIGYFLITKYHMNFFVALVLTMVLTAILGVVIEFLAYRPLRNSTRIAALITAIGVSFFLEYSMVRLVGANKHAFPQTLATVKYNLGPVSVTNVQLIILGVSIFLMLALQFIVQKTKMGKAMRAVSVDSDAAQLMGINVNSTISFTFALGSALAGAGGVLIGLYYNSVDPLMGMVPGIKAFVAAVLGGIGIIPGAAVGGFMIGLLETFSVSIGLASYKDAVVYAVLIIILLVRPAGILGKNVKEKV

SEQ ID NO: 832 - DNA, 957 bp, Streptococcus mutans
  CDS (1)..(957)
atgaaaaaaaatttaaaagcaaatataacttggcttgccctagtccttatcatcttttttcttctttttggacttattagtgctggtatcatagatatttactatactcaaattctcatgggaattgggattagtattatcatggcactcggaaccaacttagttcttggcttttctggacagctctctcttggacaagctggctttatggccattggtgcttatgcaactgctattttaacaactcaaaatcctacttatgcaggtttctatttatccattattgtcggtatgatagtgactgcaacggttgccttggttgttgggattccaacacttcgtttgaagggtgattacttagctattgcaactcttggtgtagctgaaattatccgtaaactgattgaaaatggtggtgatttgactaatggttctaggggaattatgggaattctcaaatacaccacttggccagtcgtctttgttttcgttgttttgattaccatttttgtgttaaattatctgaggagtcctatgggaagagaagtacttgcggttcgtgaagatgaaattgcagcagaagctatgggggtgaatacgacaaaaattaaggtacttacttttatgattgctgcagtaatttccagcattgcaggttccctttatgtcggttatattggtacagtcgctcctaaagattttaccattatgaaatcaattgattttcttatcgtggctgttcttggtggacttggctcagtaacaggaactattgtggctgctgttgttttgggtatcctcaatatgttcttgcaaaatgtatcagatattcgtatgattatctattcgttagctttaattttggttatggtctttagaccaggcggtcttttaggaacatgggaattcagtttttcaagacttttcgctaaaaaagctaaggagggcgacaaatag

SEQ ID NO: 833 - protein, 318 aa, Streptococcus mutans
MKKNLKANITWLALVLIIFFLLFGLISAGIIDIYYTQILMGIGISIIMALGTNLVLGFSGQLSLGQAGFMAIGAYATAILTTQNPTYAGFYLSIIVGMIVTATVALVVGIPTLRLKGDYLAIATLGVAEIIRKLIENGGDLTNGSRGIMGILKYTTWPVVFVFVVLITIFVLNYLRSPMGREVLAVREDEIAAEAMGVNTTKIKVLTFMIAAVISSIAGSLYVGYIGTVAPKDFTIMKSIDFLIVAVLGGLGSVTGTIVAAVVLGILNMFLQNVSDIRMIIYSLALILVMVFRPGGLLGTWEFSFSRLFAKKAKEGDK

SEQ ID NO: 834 - DNA, 870 bp, Streptococcus agalactiae
  CDS (1)..(870)
atgcttcaacagctcgttaatggacttatcttaggatccatatatgctttacttgccttaggatatactatggtatatggcattattaagctgattaattttgctcatggggacatctatatgatgggcgctttcatgggctattatttgattaatcatcttcatcttaattttttcctagctttattaattgcaatgctggggtctgctttcctaggtgttgtaattgaatatttagcttatcgtccactgagaaaatcaactagaattgccgcgttaattacagctattggtgtttcttttcttttggagtacgggatggtataccttgttggagcggatactagggcatttccgcaagccattcatactgttaaatataatttaggaccgataactataaccaatgttcagctcatcattttaggtattgcgctattactaatgcttactttacagttcatcgttcaaaaaactaaaatggggaaagctatgagagctttatcagtggatagcgatgccgcacaattgatgggaattaatgttaaccgtaccattagttttacatttgcgctggggtctgctttagctggagcaggtggagtactgattgggctttattataattctgttcaacctcttatgggggtaactccagggttgaaagcatttgttgcagctgtcttaggtggtattggtatcattccgggagcggctatcggtggttttgttattggcattttagaaactttagcgactgcacttggtgtgtcagattttcgagatggtatcgtttatgctattttaattctcattttcttgatccgtccagcaggaattcttggaaaaaatattaaggagaaggtctag

SEQ ID NO: 835 - protein, 289 aa, Streptococcus agalactiae
MLQQLVNGLILGSIYALLALGYTMVYGIIKLINFAHGDIYMMGAFMGYYLINHLHLNFFLALLIAMLGSAFLGVVIEYLAYRPLRKSTRIAALITAIGVSFLLEYGMVYLVGADTRAFPQAIHTVKYNLGPITITNVQLIILGIALLLMLTLQFIVQKTKMGKAMRALSVDSDAAQLMGINVNRTISFTFALGSALAGAGGVLIGLYYNSVQPLMGVTPGLKAFVAAVLGGIGIIPGAAIGGFVIGILETLATALGVSDFRDGIVYAILILIFLIRPAGILGKNIKEKV

SEQ ID NO: 836 - DNA, 954 bp, Streptococcus agalactiae
  CDS (1)..(954)
atgaaagaaaatatgaaatcaattttatcttggttagctatagtagtgttaggttatctcttgattagcgtgctaatatctatgggtatatttaacctctatcatattcaaattattgaaacaattgggattaatgttattttagcagttggtttgaacctaattgtaggttgttcgggacagttttcactaggacatgcaggtttcatggctattggcgcttatgcagttgctattatcggcgttaaaatgccaacttatgtaggttttttgatagctatacttgttggaactcttgttgcaggaggtattgccttaggtgtaggaattcctactttgagactaaaaggtgattatttagctatagctactttaggtgttgctgagattatccgtattttgttggttaatggaggtgatattacgaatggtgctgcgggtatcatggggattccgccttttacaacctggtctttagtttatggggtggcagttgtgagtcttatccttgcaatgaattttttgcgtagtcccttagggcgtaatacaattgctatacgagaagatgaaattgcagcagagtctatgggtgtggatacaacaaaagtgaaagtaattgtttttgtttttggagctattttagcttctatcgctggtagtttacaggctggctacgttggaactgttatgccaaaagacttttcatttatgatgtctgtcaatgttttaattattgttgttttaggtggtttaggttcaatgacagggacagttttagcagcaattttattaggattattgaatatgttactacaagactacgcttctgttcgaatgattatctatgctttagctctgattttaattatgatttttagacctagcggtttattaggaacgaaggagttaactctatctcatctatttcgtaagacgagtaagggaggcaattag

SEQ ID NO: 837 - protein, 317 aa, Streptococcus agalactiae
MKENMKSILSWLAIVVLGYLLISVLISMGIFNLYHIQIIETIGINVILAVGLNLIVGCSGQFSLGHAGFMAIGAYAVAIIGVKMPTYVGFLIAILVGTLVAGGIALGVGIPTLRLKGDYLAIATLGVAEIIRILLVNGGDITNGAAGIMGIPPFTTWSLVYGVAVVSLILAMNFLRSPLGRNTIAIREDEIAAESMGVDTTKVKVIVFVFGAILASIAGSLQAGYVGTVMPKDFSFMMSVNVLIIVVLGGLGSMTGTVLAAILLGLLNMLLQDYASVRMIIYALALILIMIFRPSGLLGTKELTLSHLFRKTSKGGN

SEQ ID NO: 838 - DNA, 987 bp, Oceanobacillus iheyensis
  CDS (1)..(987)
atgattaaaaataatacacaaaaatatatcgttattggattactcatggttgctattctcttccctctattcacccaaaataattactatattcatgtcatgacgctatcgtttatatggatgatcgccgtatatggattaaatatactggcgggatataccggttatttatcattggctcatgctggattctttgcaattggagcatatgcattaggcttactaaccgtaaaggcagaagtgggtttttggctagctttaattttagcaccaattataacaacaatcattggatttggaattggtttaattgcattgcgcaccaaggaacatttttttgctatatacacactttgtgtagggtacgtcatctatttattaattgataagtgggatagtttaacagaaggagttcgcggactaatgggcataccgttaccatctgatattggtccaatctcttttgagagtaatatcgctcaatactatttcattttaatcgtattgcttttctctattttcgtgatttatagaattgtaaattccatagtcggaaaaaagctaatcgcaattcgtaatagtgaacaactcgctttatcattaggtatttcaacgaaaaaaaataaactacttgcttttgtattatctacgttttttgcaggattagcgggtgcgttatatgcaagttttatacggttcctaggtccagatatcggttctacaaatataacatttgatctactcatgtatttaattgtcggaggtattggtacattatctggtccgattataggtactctattagtcgtatggctttctcaaaatctacaattcttacaagattatcgaatgctaatatttggtccattattggcactgttaatcattttctcccctcgaggtattgtaggtatgttctctagcatgaagcaaaacatccaacaaaaaagagatttacggcaaaaacaactaaaaaaagaagcgtag

SEQ ID NO: 839 - protein, 328 aa, Oceanobacillus iheyensis
MIKNNTQKYIVIGLLMVAILFPLFTQNNYYIHVMTLSFIWMIAVYGLNILAGYTGYLSLAHAGFFAIGAYALGLLTVKAEVGFWLALILAPIITTIIGFGIGLIALRTKEHFFAIYTLCVGYVIYLLIDKWDSLTEGVRGLMGIPLPSDIGPISFESNIAQYYFILIVLLFSIFVIYRIVNSIVGKKLIAIRNSEQLALSLGISTKKNKLLAFVLSTFFAGLAGALYASFIRFLGPDIGSTNITFDLLMYLIVGGIGTLSGPIIGTLLVVWLSQNLQFLQDYRMLIFGPLLALLIIFSPRGIVGMFSSMKQNIQQKRDLRQKQLKKEA

SEQ ID NO: 840 - DNA, 864 bp, Oceanobacillus iheyensis
  CDS (1)..(864)
atggagatattaatacaacagttattcaatggtttaacgatcggtagtgtatatagtttagtagcattaggtctcacacttgtttatggaattttgcatgtacccaattttgctcatggagccatttatatgattggtggctacgtaacattaacgatgatggtctatttgggattatcttattggctatcgatgcttatttctgtattagtagttggaaccctagcattattaatggaacgtcttatattccatcctctaagaaattctatctccattaatagtatgattgctgcaattggaatgttgttatttttagaagcgtttgctcagctgttctggggtccagattttcgagagatgccaacaccatacaatgaagtagtcaatgtatttggattaacatttacggttcagagaatcttgattgttgtggcagcaattgttgttatgatattactttatgcttttcttaagaaaacgtttataggtcgaactatcattgcattgtcgcaaaatcgagaaggtgcgtttttggttggtattaatgcgaataaagtagcgatgttgactttctttatagctggcgctttagcggcaattgcagcatcacttacatcgccaatcaatcttgtatttcccggcatgggacacctcgttatcttaaaggcatttgttattattattatcggtggtatgggtagtatacctggtgctattgtaggtggttatattttaggatttagtgaaagtattggggcaacctatatctctagtgattataaagatattattgctttcgttcttctgatcattattctctctatcaagcctaatggcatatttgctaagggggaacactaa

SEQ ID NO: 841 - protein, 287 aa, Oceanobacillus iheyensis
MEILIQQLFNGLTIGSVYSLVALGLTLVYGILHVPNFAHGAIYMIGGYVTLTMMVYLGLSYWLSMLISVLVVGTLALLMERLIFHPLRNSISINSMIAAIGMLLFLEAFAQLFWGPDFREMPTPYNEVVNVFGLTFTVQRILIVVAAIVVMILLYAFLKKTFIGRTIIALSQNREGAFLVGINANKVAMLTFFIAGALAAIAASLTSPINLVFPGMGHLVILKAFVIIIIGGMGSIPGAIVGGYILGFSESIGATYISSDYKDIIAFVLLIIILSIKPNGIFAKGEH

SEQ ID NO: 842 - DNA, 885 bp, Corynebacterium efficiens
  CDS (1)..(885)
atggacattctactcaatcagctagtagcgggcctgtcagtggggtccgttctgctgctggtggcggttggtctttccctgaccttcggtcagatgggggtcatcaacatggcccacggcgagttcatcatggttggggcctacacggccttcgttgtgcagggggttatcaactctgcagggttctcgcttttgatcagtattccactggcatttgccatcggagggctcctcggggttctccttgaacagaccttgctacgccatctctaccaccggcctttggacacactgcttgcgacctttggcgttggtctgatcctgcagcagctggccagggatattttcggcgcaccagcagtagacgtacgtgcgcctgaatggttgcgtggtcataccgaaattctggggactctggtgccggtgtcccgactgttcattctctttctcgccttggcctcagtggccggattggcggtgtttctcaaccgttccatctggggtcggagaatcagggcagtcgtgatcaatcgcgatctcgccgagactaatggcatcaatacccgggccacggaccgtatgaccttttttatcgggtctggtctcgccggaattgcaggcgtcgccatcactctcattggagccaccgggccgaccatcggtcagaactacattgtcgacgctttccttgtcgtggccgcgggtggaatcggcaagatcaagggcgcggtgatcatggcgtttgttctgggcataatgcaagccttcattgagtactcaaccggtgcgagtattgcgaagttcattgtgctgattgcagtggtcgcctttcttcagttccgcccccaagggctgtttcaaacccgaacaaggagcctcgtatga

SEQ ID NO: 843 - protein, 294 aa, Corynebacterium efficiens
MDILLNQLVAGLSVGSVLLLVAVGLSLTFGQMGVINMAHGEFIMVGAYTAFVVQGVINSAGFSLLISIPLAFAIGGLLGVLLEQTLLRHLYHRPLDTLLATFGVGLILQQLARDIFGAPAVDVRAPEWLRGHTEILGTLVPVSRLFILFLALASVAGLAVFLNRSIWGRRIRAVVINRDLAETNGINTRATDRMTFFIGSGLAGIAGVAITLIGATGPTIGQNYIVDAFLVVAAGGIGKIKGAVIMAFVLGIMQAFIEYSTGASIAKFIVLIAVVAFLQFRPQGLFQTRTRSLV

SEQ ID NO: 844 - DNA, 870 bp, Brucella suis
  CDS (1)..(870)
atgagctctctcttttctgccgccgtcgccggattgtcggcaggcggtgcctacgcaatccttggcgtgtgcgccatcttcacctacaggctggtggccgtggtcaatttcaccggagccgccatcggagccatcggcacattcatcatggtggcgctgttcggggcgggcgtgccgctggtacttgccgtgcttctcggcattgcggccggcgcgcttgcgggcatcctcgtcggccttgtcatgaccacatggtttgccaatgccaacgcctcgaccaaggccgccgtcacagcagcacttctggtcggcatcattgccgtgggcctgcgccttaccggcgggcagcacccgcattatttccccgaagtcatttccggctcggccttccggctggcgggtgtggaagtgacctgggctgcggtgctgacgcttgtgctttccgtcgcctttaccattctcaccgagcaattccttgcgcgcacgcgcaccggcctgcaattgcgcgcactgtcgcaaaggcccatggcggcggaactgatcggcatttgcgtgcgtcttctggcgcttggcgtctgggccgtcaccggcgcggtcacagccttcgcgctgatggtgatcgcgccactgcgttcgccggatttcgcgtcactcagccttctcgtcgttccggcccttgctgcggcactgatcggcgccttctcaagctttcgcgcagcacttgctggcggcgtgctgatcggcattctggaaggcgccgtcagcaccatcgatatcgtcagccaatatcgcagcaccgtgcctttcttcgtcattcttgccgtccttctgtggtcgcaacggggagcccgctgggatgaagcacgctag

SEQ ID NO: 845 - protein, 289 aa, Brucella suis
MSSLFSAAVAGLSAGGAYAILGVCAIFTYRLVAVVNFTGAAIGAIGTFIMVALFGAGVPLVLAVLLGIAAGALAGILVGLVMTTWFANANASTKAAVTAALLVGIIAVGLRLTGGQHPHYFPEVISGSAFRLAGVEVTWAAVLTLVLSVAFTILTEQFLARTRTGLQLRALSQRPMAAELIGICVRLLALGVWAVTGAVTAFALMVIAPLRSPDFASLSLLVVPALAAALIGAFSSFRAALAGGVLIGILEGAVSTIDIVSQYRSTVPFFVILAVLLWSQRGARWDEAR

SEQ ID NO: 846 - DNA, 888 bp, Brucella suis
  CDS (1)..(888)
atggtaatgatttttggaatacctttgcaggcgcttctcaggcaattgctggtcggcctcatcaatggctccttctatgccatgctgagcctcggccttgccatcatcttcgggcttctgcgcatcatcaatttcgcccatggcgcgcaatatatgctgggtgctttcgtcggctatctcctgttgagctggctcggcatcagctactggccggcgctggtcctcgcgcccctcatcgtcgggctcggcggcgcgatcatcgagcgcgtggcgctgtcgcggctttacaatctcgatccgctctatggcctgctgttcaccttcggcctggcgctggtgatcgaaggcacgttccgctattattatggtgctgccggacagccctatgcggtgccgccgtcccttgcgggcgggcgtaatctcggcttcatgttcctgccgaactatcgcgcctgggtggtcgttgcctcgctcttcgtctgtcttggcacctggcttctgatcgaaaagaccaagcttggcgcttacttgcgggccgcaaccgaaaacccgacactggtgaaagcctttggcatcaacgtgccgctgcttttaaccttcacctatgcgctgggttcggcccttgccggtcttgcgggcatcatggccgcgccgatctatcaggtcagcccgctgatgggttccaacatcattatcgtggtctttgccgtggtggtggtcggcggcatggggtcaatcctcggcgccatcatcaccggctatgtgctgggaattgcggaagggcttaccaaggtcttctacccggaagcttccagcatcgtcgtcttcgttatcatggcaatcgtccttctggttcgacccgccggactgttcgggaaggaggcctga

SEQ ID NO: 847 - protein, 295 aa, Brucella suis
MVMIFGIPLQALLRQLLVGLINGSFYAMLSLGLAIIFGLLRIINFAHGAQYMLGAFVGYLLLSWLGISYWPALVLAPLIVGLGGAIIERVALSRLYNLDPLYGLLFTFGLALVIEGTFRYYYGAAGQPYAVPPSLAGGRNLGFMFLPNYRAWVVVASLFVCLGTWLLIEKTKLGAYLRAATENPTLVKAFGINVPLLLTFTYALGSALAGLAGIMAAPIYQVSPLMGSNIIIVVFAVVVVGGMGSILGAIITGYVLGIAEGLTKVFYPEASSIVVFVIMAIVLLVRPAGLFGKEA

SEQ ID NO: 848 - DNA, 870 bp, Brucella suis
  CDS (1)..(870)
atgcagactgtgctcagcattgctgtcgatgcccttgcctatggcatggtgcttttcgtcatctccatcggcctttccgtcaccatgggcctgatgcgcgtcgtcaatctggcacatggcgcctttgcgatgatcggtggctatttcgcatcctatgccgcacaacagcttggcctcaattatggctttgcgatcatcattgcggtcgtcggcacgatgattatcgccgtgccggtggaaaggctgctttaccgccgtatctatggtgcaccggaattgacacaggtattgatgaccattggcgtcacgttctgcatcatcggcatcaccaattatattttcggcccgacgctgaagaccattcccctgccggaaatgctgcgcggctcggtcgatctcggctttcacgctattgcaaagcaccgcattttcgctatcggctgcggcctcgcggtggcagtcggcctatggtacgccgtcgagcgcaccgctttcggcgtgaaactgcgcgctgccgtcgataatgccaatatggcggcagccctcggcgtgcgtaccgagatcgtctatgcggtgagctttgcgctcgccatcgggcttgcggccttcggcggcgtggtcggcgcggagcttttgcccgtcgaaccctattatgcgctgcgctacatggtgactttccttgtcgtggtttcggtcggcggggccggttctatccccggcgcactcgtcgcctgcctgttgctcggcgcaatcgacacgaccgggcgttacctcgcacccgaatatggcgaattcttcttttatctggcggtgatcgtgatcgttaccctgttcccgcgcggccttgcaggaaggctggcccgcaaatga

SEQ ID NO: 849 - protein, 289 aa, Brucella suis
MQTVLSIAVDALAYGMVLFVISIGLSVTMGLMRVVNLAHGAFAMIGGYFASYAAQQLGLNYGFAIIIAVVGTMIIAVPVERLLYRRIYGAPELTQVLMTIGVTFCIIGITNYIFGPTLKTIPLPEMLRGSVDLGFHAIAKHRIFAIGCGLAVAVGLWYAVERTAFGVKLRAAVDNANMAAALGVRTEIVYAVSFALAIGLAAFGGVVGAELLPVEPYYALRYMVTFLVVVSVGGAGSIPGALVACLLLGAIDTTGRYLAPEYGEFFFYLAVIVIVTLFPRGLAGRLARK

SEQ ID NO: 850 - DNA, 885 bp, Brucella suis
  CDS (1)..(885)
atgactacctttctgcaaattcttctgaacggcctgatgcttggcgggctattcgcgattgtcgccgtcggcctgacgctcatcttcggcatcgtcaaggtcgtgaatttcgctcatggcgaattcctgatggcgggcatgttcgtgacgtggctgataaccacaaagctggggcttcatccttatgcggcggttatcattgttctgcctgcgatgttcattctgggtgcgctgacccagcgccttctcattcagccgctaatggcttctgatgacggtcatgcacagattttcgcaaccgttggcctgtccacggcgatgattaatctggccctgctgatcttcggtgcggatatagccaatacaccgaatttcggactgcggaccccaatcgaaatcgggccgcttcgcgtacttaccgggcaggtctttatttttctgggcgccattgtgcttgtcgttgcgcttcaactgttcctgaagaacagccagactggccgcgcaatccgcgccgttgctcagcatcgcagtgcggcggaattgatgggggtcaatgtttcgcgcatctacattctctgttttggcctgggagccgcctgtgtcggactggctgcggttctgattgcaccgctctatccgacttcttcaaatatcggcacctatttcgtgctgacggccttcgtggttgtggtgctcggtggccttggctcgatccctggagccttcgttggtgcgctgatcatcggcgtgatcgacaccatgtcgggctactacatcggatcagacctgcgggaagccgtcgtattcggcattttcctcctgatcctcatcctcaagccttctggcctctttggcaagcagcttaatctttcgcatttgtcctga

SEQ ID NO: 851 - protein, 294 aa, Brucella suis
MTTFLQILLNGLMLGGLFAIVAVGLTLIFGIVKVVNFAHGEFLMAGMFVTWLITTKLGLHPYAAVIIVLPAMFILGALTQRLLIQPLMASDDGHAQIFATVGLSTAMINLALLIFGADIANTPNFGLRTPIEIGPLRVLTGQVFIFLGAIVLVVALQLFLKNSQTGRAIRAVAQHRSAAELMGVNVSRIYILCFGLGAACVGLAAVLIAPLYPTSSNIGTYFVLTAFVVVVLGGLGSIPGAFVGALIIGVIDTMSGYYIGSDLREAVVFGIFLLILILKPSGLFGKQLNLSHLS

SEQ ID NO: 852 - DNA, 909 bp, Brucella suis
  CDS (1)..(909)
atggaatatttcttccagcaggtgatcaacgggcttgcgctcggttcgatctatggcctgatcgccatcggttatacgatggtctatggcattatcggcatgatcaactttgctcatggcgatatcttcatgctcggcgcgttcatggcgctgattgttttcctcattatcacgaccttcaccggaatgctgccggttgcactgatgctgcttttgatgatgatcgtcgccatgcttctgacgggtctgtggagctgggcgatcgagcgcgtggcctatcgaccgctgcgtggttcgttccgccttgcgccgctgatcacggctatcggcatgtcgattgccttgtcgaacttcgttcaggtcacgcagggtccgcgcaacaagccggttccccagcttctgaatggttcctacgagctgttcggcagcggcgtcacgatctcgctcaagcagatcgtggtgatcgtggttacggcaatattgctcacgatcttctggtatgtcgtcaaccgcacctcgctggggcgcgcgcaaagggcttgcgagcaggatcgcaagatggcggcccttcttggcatcaatgtcgaccgtgtcatctcgctcaccttcgtgatgggcgccatgctggcggccgtagccgggacgctttacctctccttctatggcgtgatttcgttcgctgacgggttcatccccggtgtgaaggcgttcacggcggcggttctgggcggcatcggctcgcttccgggggctgttgtcggcgggttgcttatcggtctcatcgaagcgttgtggtcggcctatttctcgatcgactacaaggacgtcgccgcgttctcgatcctggctatcgtgctgatcttcatgccgtccggcattcttggccgacctgaagtcgaaaaggtgtaa

SEQ ID NO: 853 - protein, 302 aa, Brucella suis
MEYFFQQVINGLALGSIYGLIAIGYTMVYGIIGMINFAHGDIFMLGAFMALIVFLIITTFTGMLPVALMLLLMMIVAMLLTGLWSWAIERVAYRPLRGSFRLAPLITAIGMSIALSNFVQVTQGPRNKPVPQLLNGSYELFGSGVTISLKQIVVIVVTAILLTIFWYVVNRTSLGRAQRACEQDRKMAALLGINVDRVISLTFVMGAMLAAVAGTLYLSFYGVISFADGFIPGVKAFTAAVLGGIGSLPGAVVGGLLIGLIEALWSAYFSIDYKDVAAFSILAIVLIFMPSGILGRPEVEKV

SEQ ID NO: 854 - DNA, 1077 bp, Bifidobacterium longum
  CDS (1)..(1077)
atgctttccaccaaacagtcctatctggtgtgcttcatcggcatcctcgccgcgttcggcatcgtgatggcgctgtgcgaatccggcttggccgactcctacatcaagggcatcatgatgaccgcgtgcatcgccatcatcatgaccacctccctgaacctcaccatcggcgtgctcggccagctgacgctgggctgctgcggtttcgaggccatcggcgcctacgtggccgcactgacctccaaatacatggtcgccgccggcattgccatcgaccccaccgcccgcttcctgctcaccacgctgatcggcggcgtggtggcctgcgtgttcggcatcctgatcggcattcctgccctgcgactgcacggcgactacctggccatcatcacgctgggcttcggtgagatcatccgcgtgatcatccagaacctcaaggtagccggcggcatgggcctcgacaagggcgccgccggacaggcgctgatcggcatcgaacgcaccgccaacctgtacgtcgtgttctggatcatggtggtcaccgtggtcgtgctcttcatgttcggccgctcccgttacggccgtgcggtcaaggccatccgcgacgacgagatcgccgccggcgcctccggactcaacaccacgtacctcaaggtgctcgtcttcgcgatctccgcgttcttcgcgggcatcgccggcggtatcttcgcccagtacatcggctcgctcaaccccaccatggccggttggctcaactccatcaactacgtgatcatggtggtgttcggcggcatgggttcgctcaccggctcgatcgtctccgccatcggcctgaccatcctgcccgagctgctgcgcgccttcgccgactaccgtatgctcgcctactcggtggtgctggtgctcgtcatgatcttccgcccgcagggcatcttcggatcctgggagttctcactgccgcgtctggtcaaccgcatgctgttccgcggcgccgccggcaagggcgcgaaacccgcggccagcgccaagcagcatgaccagtccgacgacaagaccgtgaaggaggcctcacgatga

SEQ ID NO: 855 - protein, 358 aa, Bifidobacterium longum
MLSTKQSYLVCFIGILAAFGIVMALCESGLADSYIKGIMMTACIAIIMTTSLNLTIGVLGQLTLGCCGFEAIGAYVAALTSKYMVAAGIAIDPTARFLLTTLIGGVVACVFGILIGIPALRLHGDYLAIITLGFGEIIRVIIQNLKVAGGMGLDKGAAGQALIGIERTANLYVVFWIMVVTVVVLFMFGRSRYGRAVKAIRDDEIAAGASGLNTTYLKVLVFAISAFFAGIAGGIFAQYIGSLNPTMAGWLNSINYVIMVVFGGMGSLTGSIVSAIGLTILPELLRAFADYRMLAYSVVLVLVMIFRPQGIFGSWEFSLPRLVNRMLFRGAAGKGAKPAASAKQHDQSDDKTVKEASR

SEQ ID NO: 856 - DNA, 927 bp, Bifidobacterium longum
  CDS (1)..(927)
atgaccgatcagatcatcatgttcatcagccagctgttcaacggtctgaaaatcggcagcgtgtacgcgctggtggcattgggctacaccatggtctacggcatcatccgactgatcaactttgcccacggcgatttcatcatggtcggagcctacgtgctcatgctcaccattccggccatcgtggccatgggactgcccgcctgggtggcggtcattcccgccatcctggtatgcgtggccgtcggcgtgatcgtcgaaaaggccgcctataagccggtgcgtgaaaagggcaactccatgaccgccctgatcaccgccatcgccatgtcgttgctgctggagaacggctcacaggccatcttcggcgccgacttccagaccgtcccgaccatcttccacctgccgtccatcgcgttcggcaagctcaagctgccgggagacaccctgctgaccatcgtcatcggcctggtcatcatggtgggcctgcagctgttcgtcaaattcaccaggcagggcaaggccatgcgcgccgtctccgaagacaaggaggccgccgtgctcatgggtatcaacgtgaactccaccatcgccctgacattcgccatcggctccggtctggccgcggtcgcctcgctgatgtactgcgccgcctacccgcaggtctcgcctatgatgggcgccatgctgggcctgaaggcgttcgtcgccgccgtgctcggcggcattggttccatcccgggcgccatgatcggtggtctggccatcggtctgatcgaaagcctgaccaaggcgtatatcggcaccatcacggcgggcatcatcacctcggcgttctccgacgccatcgtgttcgccatcctgatcatcgtgctgctcgtcaaaccgtccggcattatgggcaagaacgaaggggagaaggtctga

SEQ ID NO: 857 - protein, 308 aa, Bifidobacterium longum
MTDQIIMFISQLFNGLKIGSVYALVALGYTMVYGIIRLINFAHGDFIMVGAYVLMLTIPAIVAMGLPAWVAVIPAILVCVAVGVIVEKAAYKPVREKGNSMTALITAIAMSLLLENGSQAIFGADFQTVPTIFHLPSIAFGKLKLPGDTLLTIVIGLVIMVGLQLFVKFTRQGKAMRAVSEDKEAAVLMGINVNSTIALTFAIGSGLAAVASLMYCAAYPQVSPMMGAMLGLKAFVAAVLGGIGSIPGAMIGGLAIGLIESLTKAYIGTITAGIITSAFSDAIVFAILIIVLLVKPSGIMGKNEGEKV

SEQ ID NO: 858 - DNA, 822 bp, Pseudomonas resinovorans
  CDS (1)..(822)
atgggcgtcatcaacctggcccacggcgccttctacatggtcggcgcgttctgcgcggcctacaccgcgtcgctgagcggctcgttctggctcgccgggttggcggcggtgatcggctcggccctgtacgggctgctgatcgaaaccagcatcatgcgccgcctctacaaccgcgatcacctcgaccaggtactggccaccctggcggtggtgttcttcaccaacgagttaatcaccgtgctgttcggccgcagcccaccggccatgcccacgcccgagtggtattcgagcttcgtcgaagtgctgccggggttgatgtacccggtcagccgcttgctgttcatcgccgccggggccgtggtggcgatcgccatgtggctgctgataaaccacacgcgcctgggcatgctgatccgcgccggggccgacgaccacgaaatggtcggcgccctgggggtgaacatcgcacgcctgtacaccctggtgttcgtgttcggctgcgtgctttgcggcctcgccgggttcatggccgcacccttgctgtcggtggaaatcggcatgggtgaaaaggtcttgattaccaccttcgtggtcatcgtggtcggcggtgtcggctcggtgcgcggcgccctggccggggccttgctgatcggcatggtcgatggcctggggcgtgcctacatcccgcaattgctggaccaactgttgcccgccgaagtcagcggcaccctgagcggcgggctgatttccgccagcgcctacatcgtcatggccgtggtgttgctggtccgcccccgcggcctgctgcccgcccgtgcctga

SEQ ID NO: 859 - protein, 273 aa, Pseudomonas resinovorans
MGVINLAHGAFYMVGAFCAAYTASLSGSFWLAGLAAVIGSALYGLLIETSIMRRLYNRDHLDQVLATLAVVFFTNELITVLFGRSPPAMPTPEWYSSFVEVLPGLMYPVSRLLFIAAGAVVAIAMWLLINHTRLGMLIRAGADDHEMVGALGVNIARLYTLVFVFGCVLCGLAGFMAAPLLSVEIGMGEKVLITTFVVIVVGGVGSVRGALAGALLIGMVDGLGRAYIPQLLDQLLPAEVSGTLSGGLISASAYIVMAVVLLVRPRGLLPARA

SEQ ID NO: 860 - DNA, 1080 bp, Corynebacterium glutamicum
  CDS (1)..(1080)
atgagcactcaactcaagctgaagaagcccgcaaagaagaaaactacgccgaaacttagcgtcgtaaatgctcccacgctgcgcactgcggcgttgggcctggccgcgctcgctgcggtattgctgtgcgccccgctctttttatccacattccagctgacgttgatgtcgcgcttggtgtgttatgcgatcgtcgcagtcggcatcgggctggcgtggggcagaggcggcatgctcacgctggggcaaggcgtgttctttggaatcggcgcgtacatcatggccatgcacatgctgtacagcgattcgcagatttttgggaccacagttccgcaatggtggtccatttttgccaacccggcagtcgcactcatcgcagttgtggcgcttcccggcatcgtggcttttgtgctcggcttctccattttcaaacgacgcatcaaaggcgcctactttgccatcgtgaaccaagcgctcgccgcagctgttgtggtgttgctggtcggacaacaagattcccttggaggttccaatggtctttccggatttcgatcgttcatgggttttgccgtctacgaccccatcaaccgcatcatgttttacttcaccgcagtgggagttctcttggctttggtggctatctcatattggctcatgcgcagccgctatggagaactgctcgtggccaccagagatgcagaagaacgcgtccgattcctcggatatgatcccgcattgatcaaaaccgccgcatatgtcattgctgcgatgattgccggaatcgccggagcgctgttcgtgccgatcgtgggcatcatttcacccgcagaaatcggcgtggtgccatcaatcgtgttcgtgatcgccgtcgccgctggtggcagggcatccctattcggtcccgtagttggcgcgctggtgctgggctgggtggaatccacacttgctcaaactttccccagcatgtggtcctatttccagggtgcgatcctggttctcgtgatcgtgttgctgccgggcggaattgcttcaattaaactttccgcgctcaaaaataaggccaggaaggccacctcatag

SEQ ID NO: 861 - protein, 359 aa, Corynebacterium glutamicum
MSTQLKLKKPAKKKTTPKLSVVNAPTLRTAALGLAALAAVLLCAPLFLSTFQLTLMSRLVCYAIVAVGIGLAWGRGGMLTLGQGVFFGIGAYIMAMHMLYSDSQIFGTTVPQWWSIFANPAVALIAVVALPGIVAFVLGFSIFKRRIKGAYFAIVNQALAAAVVVLLVGQQDSLGGSNGLSGFRSFMGFAVYDPINRIMFYFTAVGVLLALVAISYWLMRSRYGELLVATRDAEERVRFLGYDPALIKTAAYVIAAMIAGIAGALFVPIVGIISPAEIGVVPSIVFVIAVAAGGRASLFGPVVGALVLGWVESTLAQTFPSMWSYFQGAILVLVIVLLPGGIASIKLSALKNKARKATS

SEQ ID NO: 862 - DNA, 885 bp, Corynebacterium glutamicum
  CDS (1)..(885)
atggacattttactcaatcagctcgtagccgggctttcagttggatcggtccttctattggtcgcagtgggattgtcactgacctttggacagatgggcgttattaatatggcgcacggagagttcatcatggtcggcgcatacaccgcatatgtggtgcagctggtcgtcggttctgccggtttatccctactgatcagcattccgctggcctttattatcggtgggcttttcggagttctcctcgaacaattcctgctgaagtatctttatcacaggccactagacacgctgctggccacattcggtgtcggtttgatccttcagcagctggcccgaaacattttcggagctcccgcagtggatgtcagggcaccggaatttctccgcggaaacgtcgaagttctaggcgtcttggtgccgaccgcgcgactattcatcctggcgctggccatcgcatcagtgactgcactagctgtgttcctaaatcgcactgcctggggccgacgcatccgcgccgtggttctgaaccgcgacctcgcggaaaccgcaggtattgatacccgagctactgaccgaatgacgttctttgtgggctccggtcttgccggaatcgccggggtagctatcacattgattggcgcgaccggccccaccatcggtcagaactacatcgtggatgccttccttgttgttgccgccggtggcatcggccgggtgaagggcgctgtgatcatggctttcgtgctgggaattactcaagcattcgtggaatatacgacaggtgcgagcatcgcgaagttcatcgtactcatcgctgttgttgccttcctgcagtttaggcctcaaggactcttccaaacccaaactaggagcctcgtatag

SEQ ID NO: 863 - protein, 294 aa, Corynebacterium glutamicum
MDILLNQLVAGLSVGSVLLLVAVGLSLTFGQMGVINMAHGEFIMVGAYTAYVVQLVVGSAGLSLLISIPLAFIIGGLFGVLLEQFLLKYLYHRPLDTLLATFGVGLILQQLARNIFGAPAVDVRAPEFLRGNVEVLGVLVPTARLFILALAIASVTALAVFLNRTAWGRRIRAVVLNRDLAETAGIDTRATDRMTFFVGSGLAGIAGVAITLIGATGPTIGQNYIVDAFLVVAAGGIGRVKGAVIMAFVLGITQAFVEYTTGASIAKFIVLIAVVAFLQFRPQGLFQTQTRSLV

SEQ ID NO: 864 - DNA, 927 bp, Fusobacterium nucleatum
  CDS (1)..(927)
atgttttatctttttagatatagaaaatgggagggtaaaatggagtttttacttcaaataattaatggtttacaaataggaagtatctatgctctagtgtctttaggatatacaatggtatatggtatagcacaacttattaactttgcacatggtgatattataatgataggggcatatacttcacttttttcaattccattattcacatcaatgggtttaccaatctggacaacagttattccagcaataattatttgtgcagttataggttgcttagctgaaagaatagcatatagaccacttagaaattcaccaaggatatcaaatttaataactgctattggagttagtttatttatagaaaatgtctttatgaaggtatttacaccaaatacaagatcatttcctaaaatttttaatcaagcaccaataacttttggaaatggaataaatattagtttcggagctgctataactatacttacaacagttattttatctgtgggattacaattatttatgaaaaaaactaaatatggaaaagctatgatagcaacaagtcaagattatgcagcttctgaattagttggaataaatgtagatagaacagtacaattaacatttgcaataggtagtggacttgcagcagtaggttctgtattatatgtttcagcttatccacaaatacaacctttaatgggttcaatgcttggaataaaggcctttattgcagcagttttaggtgggattggaatactgccaggtgctgttttaggtggatttatattaggaattgttgaaagtttaacaagagcatatttatcttcacaacttgcagatgcttttgtattttcaatattaattatagttttattatttaaacctactggaatacttggaaagaatgtaaaggagaaagtataa

SEQ ID NO: 865 - protein, 308 aa, Fusobacterium nucleatum
MFYLFRYRKWEGKMEFLLQIINGLQIGSIYALVSLGYTMVYGIAQLINFAHGDIIMIGAYTSLFSIPLFTSMGLPIWTTVIPAIIICAVIGCLAERIAYRPLRNSPRISNLITAIGVSLFIENVFMKVFTPNTRSFPKIFNQAPITFGNGINISFGAAITILTTVILSVGLQLFMKKTKYGKAMIATSQDYAASELVGINVDRTVQLTFAIGSGLAAVGSVLYVSAYPQIQPLMGSMLGIKAFIAAVLGGIGILPGAVLGGFILGIVESLTRAYLSSQLADAFVFSILIIVLLFKPTGILGKNVKEKV

SEQ ID NO: 866 - DNA, 858 bp, Fusobacterium nucleatum
  CDS (1)..(858)
atgattttaataaatgtaattttagcagcaagtctaaatgtaacagttggttgtttaggacaaattaccttaggacatgcaggttttatgtcaataggagcatatacagcagcacttttaactaagtctggtcttctatcaggttatccaggctatgttgtagctttgataattggaggacttgtagcaggaataattggttttataataggaatacctgctttaagacttacaggagattatcttgctattataactctggcttttggagaaattataagagtattgattgaatattttaaatttacaggtggagcacaaggattaacaggtataccaagagtaaataattttactttgatatattttataacaatattttcagttatatttatgtattcagttatgacaagtagacatggtagggcagtcttagctattcgtgaagatgaaatagcaagtggagcttctggaataaatacaacatattataaaacttttgcctttgtactatcagcaatatttgctggtatagcaggtggaatttatgcacataatttaggaattttaggtgcaaaacaattcgactataattattcaataaatatacttgttatggttgtacttggtggaatgggaagtttcacaggttcaatattatcagcaatagttcttactattttaccagaagttttaagaagttttgcagaatatagaatgatagtttacccattaattttaattataatgatgttatttagaccaaaaggattacttggtagagaagaatttcaaataagtaaaataatttcatattttactaaaaaattgaaaagaggtgaagtaaatggaaaataa

SEQ ID NO: 867 - protein, 285 aa, Fusobacterium nucleatum
MILINVILAASLNVTVGCLGQITLGHAGFMSIGAYTAALLTKSGLLSGYPGYVVALIIGGLVAGIIGFIIGIPALRLTGDYLAIITLAFGEIIRVLIEYFKFTGGAQGLTGIPRVNNFTLIYFITIFSVIFMYSVMTSRHGRAVLAIREDEIASGASGINTTYYKTFAFVLSAIFAGIAGGIYAHNLGILGAKQFDYNYSINILVMVVLGGMGSFTGSILSAIVLTILPEVLRSFAEYRMIVYPLILIIMMLFRPKGLLGREEFQISKIISYFTKKLKRGEVNGK

SEQ ID NO: 868 - DNA, 873 bp, Rhizobium leguminosarum
  CDS (1)..(873)
atgctctcgaccatactcgagcaatctgtgaatggaatcgtcacgggttccgtttacgccatcgtcgccgtcggcatgaccatgattttcggcgtgctgagagccatcaattttgctcacggcgaatactacatgctcggcacgttcggggcctggtttgcgatcgattatctcggcctgtcctacgaagtgtcgattgtcgtgggcgttcttgcgacaatcgccgttgcctatgtggtcgggcaactcgtcatgcgccggatggtcggcgcgcccgcggagtcgggcgtgctcgccacccttggcatcgcgctgatcctgcagaacaccatcattctcgtcttcggcggaggctacaagttcttcgccggaggctatatcgaaccggtttccatcctgggcttcagtctggccgagcagcgcattctcattctcgtcgtctgcctgttggtattcatcggcctcgaactgatggtcagctacacccgcctcggaatggcgatgcgcgccgtttcccagaacgtcgagtgctgcagcgtcgtcggcatcgatgtgccacaggtggtgcttcgaaccttcatgctgggggcggccctcgccgcactttcgggtgttctgacggcgccggtcaatgtcagtgtttatggcggcatgggcgagttgatcaccttcaagacgctgccgatcattatcatgggcggtttggggaatgtgcgtggaactttcgtcgcggcgatgatccttggcgttgccgagagcctggtcgccacctatgtcggcttgcaattccgcgacacggggtcgttcgccacgctgatcctgatgctgatgtggcgaccgcatggcctcttttcgacgcaggcgcgcttctag

SEQ ID NO: 869 - protein, 290 aa, Rhizobium leguminosarum
MLSTILEQSVNGIVTGSVYAIVAVGMTMIFGVLRAINFAHGEYYMLGTFGAWFAIDYLGLSYEVSIVVGVLATIAVAYVVGQLVMRRMVGAPAESGVLATLGIALILQNTIILVFGGGYKFFAGGYIEPVSILGFSLAEQRILILVVCLLVFIGLELMVSYTRLGMAMRAVSQNVECCSVVGIDVPQVVLRTFMLGAALAALSGVLTAPVNVSVYGGMGELITFKTLPIIIMGGLGNVRGTFVAAMILGVAESLVATYVGLQFRDTGSFATLILMLMWRPHGLFSTQARF

SEQ ID NO: 870 - DNA, 885 bp, Burkholderia cepacia
  CDS (1)..(885)
atgacgggatctctgtttctgcaggccattctggctggcatcacgagcggctttgtctatgccttgatcgccgtgggcattgccgtgattttcaggggcagccacatcatcaacgccatgcagggtgagtttgcggtcgttggagctttggttgctgtgttcgcgctgacgaagagcggcttgccctattggctggcagcactgctgggcgtggctgccggcgcggccatcggcgcggcgattgacgtcctcttcgtgcgtcccatgaagcggcgcaacgccagtgaggaaagcttcctgctcctgaccatcggcctcgcgtttacgttgtcagccgctgccctctacttcaccggtcgcgattcgcacctgttgccttcctatgccgagggcgtggtggaaatcgccggcgcaacgattcccaagcatgcgctttggctgatcctgatctcgttgctggtggtgggtgggttgaggcttttctatcgcaagacgcttttgggtctgtccatggcggccgcttctgccgatccggacggcgccaccacgaccggcatcgatgtgaaccgggctcggctctatacgtttctcctgggtggtgcggtcggtgccttggcgggcatcctggtcactcccttgatcgccatgaactaccacatcggcattgtctacaccctcaagggcttcgcggctgccattctgggagggatagccaacccgatcggtgccgtgctgggggggctgatgattggtctgattgagtcgctggccgcagttgtattcccatccggctaccgggatgccgttgcgatggcgttcctgatcctcatcatgatcgtcatgccgaatgggttgatcggccgagccggacgggcgggagggtaa

SEQ ID NO: 871 - protein, 294 aa, Burkholderia cepacia
MTGSLFLQAILAGITSGFVYALIAVGIAVIFRGSHIINAMQGEFAVVGALVAVFALTKSGLPYWLAALLGVAAGAAIGAAIDVLFVRPMKRRNASEESFLLLTIGLAFTLSAAALYFTGRDSHLLPSYAEGVVEIAGATIPKHALWLILISLLVVGGLRLFYRKTLLGLSMAAASADPDGATTTGIDVNRARLYTFLLGGAVGALAGILVTPLIAMNYHIGIVYTLKGFAAAILGGIANPIGAVLGGLMIGLIESLAAVVFPSGYRDAVAMAFLILIMIVMPNGLIGRAGRAGG

SEQ ID NO: 872 - DNA, 1827 bp, Ralstonia solanacearum
  CDS (1)..(1827)
atgaccacgctgaccaacgcctccgggaacgccgcaccgcgcggctggctgtcgcgcaaccgcctgctgacggcggctttcgtgatcgggctggcgctgctgccggtgctgcccacgcccgagttctggatcacgctgctcaactacatcgggctgtatagcctggtggcgctcggcctggtgctgctgaccggcgtgggcgggctcacatcgttcgggcaggcggcgttcgtcgggctgggcgcctacagcacggcgtacctgagcacgcaatacggcctgtccccgtggatcggcctgctggcggggctggcgatcacggtggcgtccgcctacgtgatcggcctgatcacgatgcgcatgtcgggccactacctgccgctggcgacgatcgcctgggggctgtcgctgttcttcctgttcggcaacctggcgttcctgggcaagtacgacgggctgaacggcatcccggtgctgaacctgctgggcaagccgctgcagaccgggcgcgagatgttctacctgatctgggccgtggtggtggtggccgtgctggcggtgcagaacctgctgaattcgcgtccgggccgcgccatccgcgcgctcaagggcggcggcaccatggccgaggcgatgggcgtgaacacggcgtggatgaaggtggtgatcttcgtggcggccgccatcctggcgtgcatttcgggcttcctgtatgcgcacctgcagcgcgcggtgaacccgacgccgttcggcctgaactacggcatcgaatacctgttcatggccgtggtgggcggggtggggcacgtgtggggcgcggtgctcggcgccggcctgctgaccatcctgaaggacagcctgcagaacctgctgcccaagctgctcggctccaccggcaacttcgagatcatcgtgttcggcgtgctgctggtgctgctgctgcagtacgcgcgcgacggcgtgtggccgtttctccgccggctgtttccgtccgcgccggccgcccgcgcgccggccgacgcacccgcgctcaggcagcgcgagaagccgcgggccggcgaactcgtcctcgacgtgcgcgccgtgcgcaaggaattcggcgggctggtggccgtcaacgacgtcagcttccaggtcagggccggcgagatcatcggcctgatcggccccaacggcgcgggcaagtcgaccacgttcaacctggtcaccggcgtgctgccggtcacgcgcggcgaggtgctgtaccgcggcgagcgcatcagcggcaagccttcgcgcgagatcgtccggcgcggcatcggccggaccttccagcacgtgcagctgctgccgggcatgaccgtgctggagaacgtcgcgctgggcgcgcacctgcgcggcgatttcgcggcgcagggcggcgtgctggccagcgtggcgcgcatgaaccggcacgaagagcagaagctgctgttcgaggcgcgctgccagctcgagcgcgtgggcctggccgattgcatgtaccaggaggcgggcagcctggcgctgggccagcagcgcatcctggagatcgcgcgcgcgctgtgctgcgatcctgcgctgctgctgctcgacgaacccgccgccggcctgcgctataaggagaagcaggcgctggccgcgctgctggccaggctcagggccgagggcatgagcgtgctgctggtcgagcacgacatggatttcgtcatgaacctcaccgaccggctggtggtgatggagttcggcaccaggatcgccgagggcgtgccgcaggacgtgcagcgggatccggcggtgctggaagcgtacctgggcggcgtggaataa

SEQ ID NO: 873 - protein, 608 aa, Ralstonia solanacearum
MTTLTNASGNAAPRGWLSRNRLLTAAFVIGLALLPVLPTPEFWITLLNYIGLYSLVALGLVLLTGVGGLTSFGQAAFVGLGAYSTAYLSTQYGLSPWIGLLAGLAITVASAYVIGLITMRMSGHYLPLATIAWGLSLFFLFGNLAFLGKYDGLNGIPVLNLLGKPLQTGREMFYLIWAVVVVAVLAVQNLLNSRPGRAIRALKGGGTMAEAMGVNTAWMKVVIFVAAAILACISGFLYAHLQRAVNPTPFGLNYGIEYLFMAVVGGVGHVWGAVLGAGLLTILKDSLQNLLPKLLGSTGNFEIIVFGVLLVLLLQYARDGVWPFLRRLFPSAPAARAPADAPALRQREKPRAGELVLDVRAVRKEFGGLVAVNDVSFQVRAGEIIGLIGPNGAGKSTTFNLVTGVLPVTRGEVLYRGERISGKPSREIVRRGIGRTFQHVQLLPGMTVLENVALGAHLRGDFAAQGGVLASVARMNRHEEQKLLFEARCQLERVGLADCMYQEAGSLALGQQRILEIARALCCDPALLLLDEPAAGLRYKEKQALAALLARLRAEGMSVLLVEHDMDFVMNLTDRLVVMEFGTRIAEGVPQDVQRDPAVLEAYLGGVE

SEQ ID NO: 874 - DNA, 900 bp, Ralstonia solanacearum
  CDS (1)..(900)
atggaatggttcgataatttctggtcggtctacagcaacctggtgctcacgctgggcatcaatgcgctgctggcgctgtccatctacctgacgctgtcgtgcggcctgctggcgatggccaatgcggccttcatgggcatcggggcctacacctccgcactgctgacgatgaatgccgagatgccgttcccggtggcgctgctgggcggcatgctggcaccggccgtggtggccgtcatcatcggccggccgacgctgcggttgtcgggcgtgtacctcgccatggcgacgctgggcttcggtgaagtggtgcgcgtgctgatccttaacaccgaatcgtggacgggcggcgcgctcggcctgaacggcatcccgcaactgaccgagtggtggcacgtggcgctggccgtggcgctgacgctgttcgtgctggcgcgcctgcgccgctccaaggtcggccgcgcgttcgaggccatcaaggaggacgagaccgccgccggcctgatgggcatcaacgtggccggcaccaagctgctggcctttgtgctgggggcgatgatcgccggcctggcaggcgcactcaacgcgcatctcacgttcttcatcggcccggcggagttcggcttcgaccgcggcgtggagatcctgaccatggcgatcctgggcggcaccaacggcctcaccgggccggtgctgggcagcgtgatcctgtcgctgctgccggaactgctgcgcgcgttcaaggatttccgcctggtggtcaacggcctgatcctgatgctgatcgtgctgttcctgcccaagggcatctgggacccggcgcgtttcgcgcgctggttcggcatgaagcgcggcggcaccatgccgggcgcgtccgccgcctctaatgaatcgcactga

SEQ ID NO: 875 - protein, 299 aa, Ralstonia solanacearum
MEWFDNFWSVYSNLVLTLGINALLALSIYLTLSCGLLAMANAAFMGIGAYTSALLTMNAEMPFPVALLGGMLAPAVVAVIIGRPTLRLSGVYLAMATLGFGEVVRVLILNTESWTGGALGLNGIPQLTEWWHVALAVALTLFVLARLRRSKVGRAFEAIKEDETAAGLMGINVAGTKLLAFVLGAMIAGLAGALNAHLTFFIGPAEFGFDRGVEILTMAILGGTNGLTGPVLGSVILSLLPELLRAFKDFRLVVNGLILMLIVLFLPKGIWDPARFARWFGMKRGGTMPGASAASNESH

SEQ ID NO: 876 - DNA, 882 bp, Ralstonia solanacearum
  CDS (1)..(882)
atgctggaacagcaactcgtcaacgcgctgtcgctcggttgcgtgtatgcgttgttcgcgctgggattcacgctggttttcggcatcctgggcgtgatcaacctgtcgcacggcgcagtgttcatgctgggcgcctacgcggcgctgcagttcgtggcgcatttcgaactgccgctgtgggcggcgctgctggtcggctttgccgcaagcggcgtggcgggcctcatcatcgatgtgctgctgctgcgcccgctgcgccgccgcaacgctccccacctgatcccgatgatcgccaccatcggcgcgggcatcgccatcaacaacgccatgcagggcgtgttcggcgcggagaacctgcgctttccggccgggctcgtctccgatgcgtcgctcgacctgggcggtgttcacctgacgccgctggagctgggcatcatcgtgctgtcgttcgcgctgatggcggcgctgatgctgctgctcaagcgcacgcagctgggccgcgcgctgcgcgccatcgcggagtcgcccaaggcggcggcgctgctgggcatcaatgtcgagggcctgttcctgctgacgtcgttcgcggcggcggcgctgggcgggctggccggcgtgctgattggcctgtattcgaacgcggtgtttccgctgatgggccagccgatgctgcacaagggcatcgcggtcatcatcctgggcggcctgggcgacattcgcggcgcgatgctgggcgggctgttcctcgggttcgccgaggtgctgtcggtggcctacatcggctcgaccatgcgcgacgcggtggcgttcggcctgctgttcctgatcctgctggtgcgcccgcaagggctgttcggcaaggtgctcgaacgcaaggcctga

SEQ ID NO: 877 - protein, 293 aa, Ralstonia solanacearum
MLEQQLVNALSLGCVYALFALGFTLVFGILGVINLSHGAVFMLGAYAALQFVAHFELPLWAALLVGFAASGVAGLIIDVLLLRPLRRRNAPHLIPMIATIGAGIAINNAMQGVFGAENLRFPAGLVSDASLDLGGVHLTPLELGIIVLSFALMAALMLLLKRTQLGRALRAIAESPKAAALLGINVEGLFLLTSFAAAALGGLAGVLIGLYSNAVFPLMGQPMLHKGIAVIILGGLGDIRGAMLGGLFLGFAEVLSVAYIGSTMRDAVAFGLLFLILLVRPQGLFGKVLERKA

SEQ ID NO: 878 - DNA, 942 bp, Ralstonia solanacearum
  CDS (1)..(942)
atgtcgtccggcgcgtgccgggcggcgccggcaacggtctctttttcccgatacgtgatggaaatcttcggcgttccgctaccggccatgctcagccagctgttgctgggcctggtcaacggttccttctacgcgatgctgagcctgggccttgcggtcatcttcgggctgctcaacgtcatcaatttcgcgcacggcgcgctgttcatgctgggcgccgtgctcacctggatgggcctgtcgtatctcgacctgccgtactgggtgatgctggtggccgcgccgctcgcggtcggcgtggtgggcgtggtgatcgaacgcaccatgctgcgcttcatctacaagctcgaccacctctacggcctgctgctgacgctgggcgtgacgctagtcatcgaaggcgtgttccgtgccgtctacggtgtgtcgggcctgccgtattcgacgcccgagctgctgtccggcgccaccgatctcggcttcatggtgctgcccaactatcgggcctgggtggtggtggcgtcgctgacggtgtgcttcgccacctggttcatgatcgagaagaccaagctgggtgcctacctgcgcgctggcaccgagaaccccaagctggtcgaggccttcggcgtcaatgtgccgctgatggtcacgctcacctatggcttcggcgtggcgctggcggcgttcgccggcgtgctggccgcgcccgtgatccagatctcgccgctgatggggcagaacatgatcatcaccgtgttcgcggtggtggtgatcggcggcatggggtcgatcctcggctcgatcgtcaccggcctggggctgggcgtgatcgaggggctgaccaaggtggtctatccgcaggcctcgtccaccgtggtgttcgtgatcatggcgctggtgttgctggtgcgcccggcgggcctgttcggcagagagaaataa

SEQ ID NO: 879 - protein, 313 aa, Ralstonia solanacearum
MSSGACRAAPATVSFSRYVMEIFGVPLPAMLSQLLLGLVNGSFYAMLSLGLAVIFGLLNVINFAHGALFMLGAVLTWMGLSYLDLPYWVMLVAAPLAVGVVGVVIERTMLRFIYKLDHLYGLLLTLGVTLVIEGVFRAVYGVSGLPYSTPELLSGATDLGFMVLPNYRAWVVVASLTVCFATWFMIEKTKLGAYLRAGTENPKLVEAFGVNVPLMVTLTYGFGVALAAFAGVLAAPVIQISPLMGQNMIITVFAVVVIGGMGSILGSIVTGLGLGVIEGLTKVVYPQASSTVVFVIMALVLLVRPAGLFGREK

SEQ ID NO: 880 - DNA, 936 bp, Ralstonia solanacearum
  CDS (1)..(936)
atggatatctttatccagcagatcgtgaacggcctggtgctcggcagcatttacgcgctgatcgcacttggctacaccatggtctacggcattctcggcatcatcaacttcgcccacggcgatgtcctgatgatcggcgcgatgtccgcactgaccgccatcaacttcctccagaagttcttccccaacctgcctgactggctgacgctggtcctggcgctgctgtttgcgatgccggtctgcgccgtcgtcgcatacaccatcgaacgggtcgcctaccggccgctgcgcaatgcgccgcgcttggcgccgctgatcaccgccatcggcgtgtcgatcgtgctgcagaccctggcgatgatgatctggtcgcgcaacccgctgaccttcccgcaactgctgccctcgtcgccgatcgacatcggttcgaccggcgcgacgatcacgggcaaggagatcgccatcatcctggtgtcgctggcggtcatgaccgggctgacgctgctggtcaaccgcaccaagctcggccgcgccatgcgcgccactgccgagaaccagcgcgtggccggcctgatgggtgttaaccccaacttcgtcatctccgccacgttcatgatcggcgctgccatggcagccgtcgccggcgtgatgatggccaccaactacggcaatgcccacttctacatgggcttcattcccggcctgaaggcgttcaccgccgcggtgctgggcggcatcggcaacctggcgggcgccatggtgggcggtgtgctgctgggcctgatcgaggccctgggtgccggctatatcggcgatctgactggcggtgtgttcggttcgaactaccaggatgtgttcgcgttcattgtgctgatttgcgtgctgctgttccgcccgtccggcatcatgggcgaacgcgttgcagaccgtgcataa

SEQ ID NO: 881 - protein, 311 aa, Ralstonia solanacearum
MDIFIQQIVNGLVLGSIYALIALGYTMVYGILGIINFAHGDVLMIGAMSALTAINFLQKFFPNLPDWLTLVLALLFAMPVCAVVAYTIERVAYRPLRNAPRLAPLITAIGVSIVLQTLAMMIWSRNPLTFPQLLPSSPIDIGSTGATITGKEIAIILVSLAVMTGLTLLVNRTKLGRAMRATAENQRVAGLMGVNPNFVISATFMIGAAMAAVAGVMMATNYGNAHFYMGFIPGLKAFTAAVLGGIGNLAGAMVGGVLLGLIEALGAGYIGDLTGGVFGSNYQDVFAFIVLICVLLFRPSGIMGERVADRA

SEQ ID NO: 882 - DNA, 1137 bp, Ralstonia solanacearum
  CDS (1)..(1137)
atgacagaaactgcaacggaattcaaagcgccgaagaagacgcgcgccgcgcttctcggcttcttcgtcctcgccatcttcgccccgttcctcgtgggcgccgtcggcgggaactactgggtacgcgtgctggacttcgcactgctgtacatcatgctggccctgggcctgaacatcgtggtgggttttgccggcctgctcgacctgggctacatcgcgttctacgcggtgggcgcctacatgatggcgctgctgggctcgccgcacctgaccaaccagttcgagtggatccatcagctgttcccgaacgggctgcatctgctgatctggtgggtgatcccgctgggcgcggggctggcggcgctgttcggcatcctgctgggggcgccgacgctcaagctgcgcggcgactacctcgccatcgtgacgctgggcttcggcgagatcatccgcatcttcatgaacaacctcgaccgcccggtgaacatcaccaacggtccgaagggcgtcaacctgatcgagccggtcaagctcttcgggttcgacttctcgaagcggcatgacatcttcggcatccacttcgagccggtgcacatgtactactacctgttcgtgctgctggcgatgggcatcatcacggtgtgcctgcgcctgcagaattcgcggatcggtcgtgcatgggttgccatccgcgaggacgagatcgccgccaaggccatgggcatcaacacccgcaacatcaagctgctggcgttcgccatgggtgcgtcgttcggcggcgtgtcgggggcgatgttcgcgtcgttccagggcttcgtgtcgccggaatcgttcgtgctgtgggagtcgatctacatcctggccatcgtggtgctgggcggcatgggccatatcccgggcgtgatcctgggcggcatcctgctggtgggcttccaggaactgctgcgcgcgctggccgagccgatccagaacaagctgttcggccacgtgatcgtggaagcggaagtgctgcgtcagctgctgttcggcctggcgatggtgggggtgatgctgtatcgccccgcgggcctgtggccctcgccgcgcaaggaagaccgcccgcagaaggcgcgggtcggtggtttgtcccgcatctga

SEQ ID NO: 883 - protein, 378 aa, Ralstonia solanacearum
MTETATEFKAPKKTRAALLGFFVLAIFAPFLVGAVGGNYWVRVLDFALLYIMLALGLNIVVGFAGLLDLGYIAFYAVGAYMMALLGSPHLTNQFEWIHQLFPNGLHLLIWWVIPLGAGLAALFGILLGAPTLKLRGDYLAIVTLGFGEIIRIFMNNLDRPVNITNGPKGVNLIEPVKLFGFDFSKRHDIFGIHFEPVHMYYYLFVLLAMGIITVCLRLQNSRIGRAWVAIREDEIAAKAMGINTRNIKLLAFAMGASFGGVSGAMFASFQGFVSPESFVLWESIYILAIVVLGGMGHIPGVILGGILLVGFQELLRALAEPIQNKLFGHVIVEAEVLRQLLFGLAMVGVMLYRPAGLWPSPRKEDRPQKARVGGLSRI

SEQ ID NO: 884 - DNA, 870 bp, Ralstonia solanacearum
  CDS (1)..(870)
atgctcagcgcactgggcgtgctgttcgacgggctggcctacggctgcctgctgttcctgatcggcatcggcctgtcggtgacgatgggcctgatgcgcttcatcaacctcgcgcacggggccttcgccatggcgggcggctacgtgtgcgtggtgctgatgaaccgcctcggcatgccgttcctggccacgctgccgatcgccttcctggccaccgccgccgccggcttcgtgctggagcgcacgctataccggcggctctatcgcgccagcccgctcgaccaggtgctgttctccatcgcgctcgtcttcatggccatggcgggcgccacctatgtctgggggccgtcgcagcagccggtggagctgccggacgcgctgcgcgggcaattgcgcgtgttcgatacggggctcgaagtcgggcgctaccgcttgttcctggtcggcgtggtggtcgtgctgacggcgctgctggcctggctgatcgagcgcacgcgcttcggcgcgcgggtgcgggcgtcggtggacaaccagcaggccgcggccgggctcggcatcaacgtgggcctggtgttctcggtcacgttcgcgctgggctcggggctggccggcctgggcggcggactgggcatcgacgtgctcggtctcgatccggcgttcccgatcaagtacatggtgtatttcctgctcgtggtggcggtgggcggcgcgggctcgatcaaggggacgctgctggcggccctggtgctgggcgtgttcgacgtggcgggcaagtactacgtgcccgaagtcggcgcattcgtcatctacgggttgatggtgctgctgctggcgctgtttccgggcggcctgctggggaggcgcgcatga

SEQ ID NO: 885 - protein, 289 aa, Ralstonia solanacearum
MLSALGVLFDGLAYGCLLFLIGIGLSVTMGLMRFINLAHGAFAMAGGYVCVVLMNRLGMPFLATLPIAFLATAAAGFVLERTLYRRLYRASPLDQVLFSIALVFMAMAGATYVWGPSQQPVELPDALRGQLRVFDTGLEVGRYRLFLVGVVVVLTALLAWLIERTRFGARVRASVDNQQAAAGLGINVGLVFSVTFALGSGLAGLGGGLGIDVLGLDPAFPIKYMVYFLLVVAVGGAGSIKGTLLAALVLGVFDVAGKYYVPEVGAFVIYGLMVLLLALFPGGLLGRRA

SEQ ID NO: 886 - DNA, 1617 bp, Ralstonia solanacearum
  CDS (1)..(1617)
atggccatgacacgcttcctcgccgcactgctgtgcgccctctgcctggttgccacgcctgccgcatcggcatgggcggccggacaaccgctgacccaggccgatctcaagccgctggccgaagacgacttcgacgccaaggtgaaggtgctcaacgccctggccgccgcgcccgccgaacaggccggccccatcctgcgggcgttgcagaatgatgcgctgttctatgcgcccgctgccggcatgctgcgccaggagggcgagcgttatctcgatgcgatcagcggccagccggttgccatgaaggccgatgacctgcaagcgctgacgctgaacaatgccctgcgcgcccaggtggacagcgcggccagcggcttcgtgctgcagtcgcccgaccgggccgtgcgcgcgcaggccatcgatacgctgctggcgcatcccgagacggcatcgcgcacggtggtcgatgcggcgcgcaagcaggagaccgatcccgaactgcggacccgcctgcatctgctgtgggccaacctggcgctcgacgacggctcgcctgccgagaagctcgaagcgctcaggctgctcgccggcgataccaacccgcagacccgccagcgcatcgcgccgctgctcgccaaggacagcggcgccgacgacgtgctgcgcgccgctgcccggcaggcgctggacaaccttgccgcgcaggcgcgcaaggccgagctgatcggcaacctgttcgccggcctgagcctgggctcggtgctgttgctggccgcgctggggctggcgatcacctacggcctgatcggcgtcatcaacatggcgcacggtgagttcctgatgatcggcgcgtatgccacctatgtggtgcagacgctttttcgcaaccatttccctgcggcgttcgactggtatctgcccgccgcgctgccggccgcgttcctggccgcggccgtcgtcggcttcgtgctggagcgcatggtgctgcggcacctgtacggccggccgctggagacgctgctcgccaccttcggcgtcagcctgctgctgatgcaggccgtgcgcagcgtgttcggtgcgcagaacgtggaggtggccaacccgagctggatgagcggcggcatcgcgctgtatccggggctgatcctgccgtataaccggctggtgatcctggccttcgcgctggtggtggtcacgctggcgtgggcggtgctcaaccgcacgcggctgggcctgttcgtgcgcgccaccacgcagaaccgcgccatggcggcgtgcgtgggcgtgcggacctggaaggtggacagctacgccttcgcgttcggcgcgggcatcgccggcctgggcggctgcgcgctgtcgcagatcggcaatgtggggccggacctcgggcagggctacatcatcgattccttcatggcggtggtgctgggcggggtggggcagctggccggcaccatcgtcggcgcgttcgggctggggctgatcaacaagtgcatcgagccgttctatggcgcggtgctggcgaagatcttcgtgctggtgctgatcgtgctgttcatccagaagcgtccgcaggggctgttcgccctcaagggccgcagcgcggaggcctga

SEQ ID NO: 887 - protein, 538 aa, Ralstonia solanacearum
MAMTRFLAALLCALCLVATPAASAWAAGQPLTQADLKPLAEDDFDAKVKVLNALAAAPAEQAGPILRALQNDALFYAPAAGMLRQEGERYLDAISGQPVAMKADDLQALTLNNALRAQVDSAASGFVLQSPDRAVRAQAIDTLLAHPETASRTVVDAARKQETDPELRTRLHLLWANLALDDGSPAEKLEALRLLAGDTNPQTRQRIAPLLAKDSGADDVLRAAARQALDNLAAQARKAELIGNLFAGLSLGSVLLLAALGLAITYGLIGVINMAHGEFLMIGAYATYVVQTLFRNHFPAAFDWYLPAALPAAFLAAAVVGFVLERMVLRHLYGRPLETLLATFGVSLLLMQAVRSVFGAQNVEVANPSWMSGGIALYPGLILPYNRLVILAFALVVVTLAWAVLNRTRLGLFVRATTQNRAMAACVGVRTWKVDSYAFAFGAGIAGLGGCALSQIGNVGPDLGQGYIIDSFMAVVLGGVGQLAGTIVGAFGLGLINKCIEPFYGAVLAKIFVLVLIVLFIQKRPQGLFALKGRSAEA

SEQ ID NO: 888 - DNA, 948 bp, Ralstonia solanacearum
  CDS (1)..(948)
atggaattcctagtcatcaacctgttgaacggcatcagctacgggctgctgctgttcatgctgtcgtcgggcctgacgctgatcttcagcatgatgggcgtcctcaacttcgcgcatgccagcttctacatgctgggcgcgtacttcgcctacgtcgtcagcggatacctgggcttctgggccgcgctgatcgtggcgccgctgctggtgggcgcgctgggggcgctggtcgagcgcttcggcctgcgcacggtgcaccgctacggccatgtcgccgagctgctgttcaccttcggcctggcctacctgatcgaagagggcgtgaagctggtgtggggcctgccggccgtgccgtaccgcgtgcccgaggcgctggacgggccgctgttcacgctgttcacctcgtccttcccgaagtaccgcgccttcatgatgctggtgtcgctgctgatgctggtgggcatcttcctgctgctcacgcgcacgcgcatcgggctggtcatccaggcggcgctgacgcatccggacatggtcgaggcgctcggtcacaacgtgccgcgcgtcttcatgctggtgttcggcgggggctgcgcgctggccgggctggccggagtgatcggcggcaacgcgttcgtgaccgagccgtcgatggcggcggcggtcgggtcgatcgtcttcgtggtggcggtggtgggcggcatgggctcgctggtgggcgccttcatcgcctcgctgctgatcggttgcatccagacctttgccgtcacgctcgatgtgtcggtgacgagcctgctgggcaagctcggtgtcgcgctcaacccggacgtgccgctgatctccgtgtggaacctgaccatcgcgcaggtggcgccggtgctgccgtacctgctgctggtgctgatgctgatcttccgcccgcgcgggctgatgggcacgcgggagggataa

SEQ ID NO: 889 - protein, 315 aa, Ralstonia solanacearum
MEFLVINLLNGISYGLLLFMLSSGLTLIFSMMGVLNFAHASFYMLGAYFAYVVSGYLGFWAALIVAPLLVGALGALVERFGLRTVHRYGHVAELLFTFGLAYLIEEGVKLVWGLPAVPYRVPEALDGPLFTLFTSSFPKYRAFMMLVSLLMLVGIFLLLTRTRIGLVIQAALTHPDMVEALGHNVPRVFMLVFGGGCALAGLAGVIGGNAFVTEPSMAAAVGSIVFVVAVVGGMGSLVGAFIASLLIGCIQTFAVTLDVSVTSLLGKLGVALNPDVPLISVWNLTIAQVAPVLPYLLLVLMLIFRPRGLMGTREG

SEQ ID NO: 890 - DNA, 960 bp, Pyrobaculum aerophilum
  CDS (1)..(960)
atggagttatttattaacgtagactatccaactcttgcaagagctataattttctctaatatttacgtactcctcagcctaggcctaaacctcacgtacataactactaagatcccctcatttgcgcacggggatttagccacaataggggcttatgtgagctattatactattgtatttctactattaccttttggactatccgctagtatatatttaaccttccccctcgtagctctagtcacaggtcttgtggctttggcaacttatatagcagtttttagacctatgatcaggagaggggccggaattacgccactaatgatcgcttcatttggtgtacactacgttttatttgcaatagtggccattatcgccgattatactcggaacacctaccaaattcttagcagaaatgtcctcttaagccggtgggagtttatttggccgggcacagacttcttgacctcgtctctaataaataccactattatagtcattgtagtcactctgttattatactttttattgtacagaactagatatggagtaataatgagggccagcattgacaacttatacctagctaaagcagttgggattaatatagagagagtattcgcagtggcgtggctattaataggggcggtgacggggatagcagggatctatatggctatgttcttccccatgactgaagagctcggctggcttaggctacctgttattttcgtggcttctgtcgtcggcggtctctccagtatatacggcgcagtgcttggcggatatgtcgtcggcctaagcctagtcctaggcgccacttatattttaacgcctttgggggtgcccactgagttccaattagtaattccgtttgcctttgtgatagcgatattgttatttgcccctcaaggcttggcgggaattatttcaagtatagcacagaaagtgagaaaatga

SEQ ID NO: 891 - protein, 319 aa, Pyrobaculum aerophilum
MELFINVDYPTLARAIIFSNIYVLLSLGLNLTYITTKIPSFAHGDLATIGAYVSYYTIVFLLLPFGLSASIYLTFPLVALVTGLVALATYIAVFRPMIRRGAGITPLMIASFGVHYVLFAIVAIIADYTRNTYQILSRNVLLSRWEFIWPGTDFLTSSLINTTIIVIVVTLLLYFLLYRTRYGVIMRASIDNLYLAKAVGINIERVFAVAWLLIGAVTGIAGIYMAMFFPMTEELGWLRLPVIFVASVVGGLSSIYGAVLGGYVVGLSLVLGATYILTPLGVPTEFQLVIPFAFVIAILLFAPQGLAGIISSIAQKVRK

SEQ ID NO: 892 - DNA, 960 bp, Pyrobaculum aerophilum
  CDS (1)..(960)
atggctaaatggtatgtatttattgtacttgtcgcttggattgtaatatcttctttttattttccgcgcgaagtcgcagatgcgttagtatacgcctcagttttagtgctcgcatcagtcggcttgacattaacctaccagaccactaaagtgcctaacttcgcgcacggagtttttataaacctcggcgtgatggccgccctcacagtggcgcagatttataaaacatctccttatgcggcgttgcccctggccgtggtcttgtcaactgcatcttcactcgccttgtattttttcctcctcccgctttataagaggcaaagcccgccggaggttatgatgatggccacaatggcttataacatagtctttataggagttttaaacgcgtatgcggattggatagggagagctgccggtattttcactagggggattaccttaaggccctacgacgtggaaatactcggcaccgccggcgtttacatattagccccactgacggcctccgcgatctccctcgccctttacctttttttaaaaacaaaaatcggcactgcgctgagggccgcggttgagaacgaggaactggccaggaccttggggataaacgttgaaaggatgtacgcaattgcctgggcaatatcgggcgccgtcgccggcgttgcgggggtttttctgcctttgtacatagaggctacgcctgacgttgggtggctcctcctcgcgagcttcttcgcggcgagtatagtggggggtttgaataatatctacggggcgttggccggaggggttttaatgggctttgtggagctgctcggcactattcaattcgcagcgcttttaaacgcccttttcgctacgcctcagtaccaagtcaccgcctacaggcctctagtgccgttgctcgcaatagccattactctactcatatcccctaaaggactgttggggcgatga

SEQ ID NO: 893 - protein, 319 aa, Pyrobaculum aerophilum
MAKWYVFIVLVAWIVISSFYFPREVADALVYASVLVLASVGLTLTYQTTKVPNFAHGVFINLGVMAALTVAQIYKTSPYAALPLAVVLSTASSLALYFFLLPLYKRQSPPEVMMMATMAYNIVFIGVLNAYADWIGRAAGIFTRGITLRPYDVEILGTAGVYILAPLTASAISLALYLFLKTKIGTALRAAVENEELARTLGINVERMYAIAWAISGAVAGVAGVFLPLYIEATPDVGWLLLASFFAASIVGGLNNIYGALAGGVLMGFVELLGTIQFAALLNALFATPQYQVTAYRPLVPLLAIAITLLISPKGLLGR

SEQ ID NO: 894 - DNA, 873 bp, Pyrobaculum aerophilum
  CDS (1)..(873)
atggatataatcccctattttttaactggattggtaattggatctatttacggcttgacgacgctggggcttagccttatttttggcgtgttgcgtgtggcaaatgtggcccacggatcgtttataatgattggggcgtacgtggcttatacctttttcgtggcatgggcaattccgccgattgtctcagcaacggcggctttgttaataggaatggcggctgggtatttagtatacgtaggcgttatcaagcctcttggaaaagccgagctgaacatattagttgccctatttgccctaggggcgttgctggcagaggtggcgaggctgatttggggccccgatttcgtgggctataggtggagtataggctctatagaaatcgcaggcctccagctggagatcacaaagctgatgggggccgtggcctctctgataatcgccgtattgttagagttgacgttgaggcggacgtacttcggccgcgctattaaggcagtagttcaagacccaataggcgcaatggtagtggggataaacgtggagagaatactggctttaagcgccgccgttggaataggcgtaaccgcattaggaggagtgttgctaacgttgttcataccagttgggattaacccttacatgggcgggccctataccctaataggctttgtcattgcagttttgggcgggctcggctctgtaatgggggcttacattgccgggttgttgtttggagttttcgagtcagtggggttttacgtcttctcgtcgctgggcttcgccgagccgtcacaaatggcgcttttcttatcctttgtactgctgttgctactgttattattcaagcctacaggtctgtttaggatatga

SEQ ID NO: 895 - protein, 290 aa, Pyrobaculum aerophilum
MDIIPYFLTGLVIGSIYGLTTLGLSLIFGVLRVANVAHGSFIMIGAYVAYTFFVAWAIPPIVSATAALLIGMAAGYLVYVGVIKPLGKAELNILVALFALGALLAEVARLIWGPDFVGYRWSIGSIEIAGLQLEITKLMGAVASLIIAVLLELTLRRTYFGRAIKAVVQDPIGAMVVGINVERILALSAAVGIGVTALGGVLLTLFIPVGINPYMGGPYTLIGFVIAVLGGLGSVMGAYIAGLLFGVFESVGFYVFSSLGFAEPSQMALFLSFVLLLLLLLFKPTGLFRI

SEQ ID NO: 896 - DNA, 888 bp, Rhizobium meliloti
  CDS (1)..(888)
atgacgatgattttcggaattcccctccaggccttcctcgggcagctgctgatcgggctcatcaacggctccttctatgcgctcctgagcctcggcctcgccatcatcttcgggctcctgcgcgtcatcaacttcgcccacggtgcgcagtatatgctcggcgccttcatggcctggctgctgctctcctatttgggcatcggctattggccggcgctcattctcgcgccccttctcgtcggcctcatcggcgccgttatcgaacgcacgatgctgagacggctctatacgctcgatccgctctacggcctcctcttcaccttcggcctggcgctcaccatcgaaggcaccttccgctatctctacggcgcgtccggccagccctatgcgacgccggcgctgcttatgggcggggccaatctcggcttcatgttcctgccaatctatcgcggctgggtcatcgtcttttcgctggtgatctgcctcggcacctggctcatgatcgagaagaccaagctcggctcctatctgcgcgccgctacggagaatccggtcctggtgcaatccttcggcatcaacgtgccctttctgctgacgctgacctacgggctcggcgcggcgctcgccgcaattgccggagttctcgcggcgccgatctaccaggtctcgccgctgatgggatcgaacatcatcatcgtcgtcttcgcagtggtcgtcgtcggcggcatgggctcgatcatgggcgcgatcgtcaccggttatctgctgggcatcgccgaaggactgaccaaggtcttctatccggaggcctccaacatcgtgatcttcgtgatcatggccatcgttctcctgctgaggcccgcgggtctcttcggtcgggatgcttga

SEQ ID NO: 897 - protein, 295 aa, Rhizobium meliloti
MTMIFGIPLQAFLGQLLIGLINGSFYALLSLGLAIIFGLLRVINFAHGAQYMLGAFMAWLLLSYLGIGYWPALILAPLLVGLIGAVIERTMLRRLYTLDPLYGLLFTFGLALTIEGTFRYLYGASGQPYATPALLMGGANLGFMFLPIYRGWVIVFSLVICLGTWLMIEKTKLGSYLRAATENPVLVQSFGINVPFLLTLTYGLGAALAAIAGVLAAPIYQVSPLMGSNIIIVVFAVVVVGGMGSIMGAIVTGYLLGIAEGLTKVFYPEASNIVIFVIMAIVLLLRPAGLFGRDA

SEQ ID NO: 898 - DNA, 891 bp, Rhizobium meliloti
  CDS (1)..(891)
atggctttcgcgatccagttcgtcatcgacgtcctgagcctcggcggcgcctatgcgctcatggcactcggcctcgtcatcatctacggcatcctgcgcctcgtgaacttcgcctatggcgaactcatcatggtggccggctacacgatgtttctcgccagcggctcgggcctgccctggatcgtcatggcggtgctcgccgtcggcatggccatcctcttcggcatcatcaccgactatgccgccttccgtccggtgcgggccaaatcggtgacggcggtgctgatcacatccttcgccttctccaacctgctgcagaacgcggcgctcctcttcatctcgccgcgccctcgcaacgtgccgctcccggatatcttctcgcagaccgtctcgatcggcggtgcgatcaccccggtccgcaatctcatcaccatcgccgcctccatcgcactgctcgccggcgtcgccttcctgatgcgcaggacgacgctcggcatcgccatgcgcgcagcggcgacgaacttcaccatggcgcgcatgctgggagtgccggcgaacctcatcatctcgtccgccttcgccctttccggcttcctcgccggcgtcgtcggcattctctggatcggccgcatcggcaccgtcgttccgggcatcggcctggagccgctgctcgtcgccttcatcgccacggtcatcggcggcatgcggagcctgcccggcgccgttgtcgggggcttcctgctcgccctcatcgacaccacgctcaactacaccctgtcgcaggacctgctgaaattccgcgacgccttcaccttcagcctcgtcatcctgatcctgctctggcgccccgacggcctcatcaggggtccggcgagcggacagcggacctga

SEQ ID NO: 899 - protein, 296 aa, Rhizobium meliloti
MAFAIQFVIDVLSLGGAYALMALGLVIIYGILRLVNFAYGELIMVAGYTMFLASGSGLPWIVMAVLAVGMAILFGIITDYAAFRPVRAKSVTAVLITSFAFSNLLQNAALLFISPRPRNVPLPDIFSQTVSIGGAITPVRNLITIAASIALLAGVAFLMRRTTLGIAMRAAATNFTMARMLGVPANLIISSAFALSGFLAGVVGILWIGRIGTVVPGIGLEPLLVAFIATVIGGMRSLPGAVVGGFLLALIDTTLNYTLSQDLLKFRDAFTFSLVILILLWRPDGLIRGPASGQRT

SEQ ID NO: 900 - DNA, 903 bp, Rhizobium meliloti
  CDS (1)..(903)
atggagtattttgtccagcagctcgtcaacgggctgacgcttgggtctatttatggtatgatcgcgatcggttataccatggtctacggcatcatcggcatgatcaacttcgcccacggcgatattttcatgcttggcggctttgccgcattgatcgtcttcttgcttctcacgacatttattgccggcgtgccggttgtactggcgcttttgatcatgatggtcgtcggtatgctgacggctgcgctttggaactggaccatcgagcgcgtggcctatcgcccgcttcgcggctccttccgtctggcgccgctgatcacggcgatcggcatgtcgatcgtgctgtcgaacttcattcaggtgacgcagggtccgcggaacaagccgatcccgccgctggtctcctcggtctatgacctgttcggcatctcggtttcgctgaagcagatcatcatcgtcgtcatcacggcaatcctgctttcggtcttctggtacatcgtcaaccgaactccgctcggacgagcccagcgtgcgaccgaacaggaccgcaagatggcagccttgctcggtgtcgatgtcgatcggacaatctcggtgaccttcatcatgggagccgcactcgccgccgtcgccgggacgatgtacctgatgtattacggcgtggtcgtgttcaccgacggtttcgctccgggtgtcaaggcgtttaccgctgccgttctcggtgggatcggttcgctgcccggcgccgtgctcggcggcttgctgatcggtctcatcgagtcgctgtggtccgcctacttcaccatcgactacaaggatgtcgcgaccttctcgattctcgcgatcgtcctgatcttcaagccgtcgggtattctcggacgaccggaagtcgagaaggtatag

SEQ ID NO: 901 - protein, 300 aa, Rhizobium meliloti
MEYFVQQLVNGLTLGSIYGMIAIGYTMVYGIIGMINFAHGDIFMLGGFAALIVFLLLTTFIAGVPVVLALLIMMVVGMLTAALWNWTIERVAYRPLRGSFRLAPLITAIGMSIVLSNFIQVTQGPRNKPIPPLVSSVYDLFGISVSLKQIIIVVITAILLSVFWYIVNRTPLGRAQRATEQDRKMAALLGVDVDRTISVTFIMGAALAAVAGTMYLMYYGVVVFTDGFAPGVKAFTAAVLGGIGSLPGAVLGGLLIGLIESLWSAYFTIDYKDVATFSILAIVLIFKPSGILGRPEVEKV

SEQ ID NO: 902 - DNA, 897 bp, Rhizobium meliloti
  CDS (1)..(897)
atggcctattttctgcagcagatcgccaatgccgtacccgtggccgcgctttatgcggcgctcgccttcggatacgcgatcgcctttgctgtcacacggcgggcggacctgacctatggcgcgctcttcgcctttgccgggcaaatcttcgtgctcttcgcggatgtcggctggaaccggctgtggctggtactgccggcggcgctcgggctcggggcgacagcggcgctcgcattcgggctaggtgccggtcttattgccggccgctacgtcatgcggcccctggctttttcctccgccaatgccgtggtcgtcgcctcgctcggaagcctgctggtgctgatggaaacggcccggctcgcctccgacaccagaagcctctggctgccgcccttcctgaacgacgtggtggtgttctggccgaaccctgcctttccggtcgcgctgacggtcgtgcagctcgtcaacaccgcgctcatgatggcccttgtcgccggcggccattggctgttgacccgttcctatgcaggccgctactggcgcgccgtttccgaggatcgcaaggccgccgcgctttgcggcatcgatccgggagcggtctatatcgccgcctatggcgtggcgtcgctgatcgctgcgttctgcgggattctcgctgcttcctattacggcaacatggatttcggcaccgggctgaccttcggggtcaaggtcctgttcatcgccgccatcggcgggcagacttcgccgttattcgcggcactgggcgcagccggcatcggcctcatggagacggtgtggagcgcctatggacccatcctctggcgggacttcgccatattcggctttctggtgatcgtgctcgtggtcacgcgccgggaaaagatcattccctga

SEQ ID NO: 903 - protein, 298 aa, Rhizobium meliloti
MAYFLQQIANAVPVAALYAALAFGYAIAFAVTRRADLTYGALFAFAGQIFVLFADVGWNRLWLVLPAALGLGATAALAFGLGAGLIAGRYVMRPLAFSSANAVVVASLGSLLVLMETARLASDTRSLWLPPFLNDVVVFWPNPAFPVALTVVQLVNTALMMALVAGGHWLLTRSYAGRYWRAVSEDRKAAALCGIDPGAVYIAAYGVASLIAAFCGILAASYYGNMDFGTGLTFGVKVLFIAAIGGQTSPLFAALGAAGIGLMETVWSAYGPILWRDFAIFGFLVIVLVVTRREKIIP

SEQ ID NO: 904 - DNA, 942 bp, Synechococcus sp
  CDS (1)..(942)
atggattggttgcaaccgctgatcaatggtctggccatcgggggcgtctatgccctgtttgccttggggtataccttggtcttttcgatcctgggggtcattaactttgcccatggtgccgtttttaccctcggtgcctacctgacttacgctctagtgggtgggcgtttcagcttcaacgggttgctcgccaatgccgcgctgcccttcagtttgccgttcgccttggctctgctgctcggcagtttgctggccggcggtgccagcctcttgattgagcaagtggcctttcgtcccctgcgccgccgccaagcggatcccctcctaaccctgatctccagccttggcgtggcggtgtttatcgtcaatttgattcaaatcttggtgggagccgagatttacaccttcccaagcaacatctacggcgacctacccagtgccatcaacttaggcagcagcgatcgcccgatccagatccgcacggtgcaaatcatcctgtttgtcgtggcgatcgcgatgttcagtctgctgacttggctgatcaacggcacccgcgttggccatgccctgaaagctgttgccgaagatgccaccaccgctagcctgctgggcatcgatcccgatcgctacatccggctgaccttcttcctgagtggcgtccttggtggtttggcgggcaccttggtcggtaccagtgtcagtatcaccggcccctatttcgggattgcctacgggctgaaaggcctgagtgtgatggtcttaggtggactcggcaatattcccggcacgattgcgggcggcttgttgttgggtctggcggaagcttgggtgccgccacaatggtcgggctatcgcgatgccgttgcctttgcgctgctatttgccatgctcttgatccgtccccagggcttgtttagtcgtgctcggacagagaaggtgtag

SEQ ID NO: 905 - protein, 313 aa, Synechococcus sp
MDWLQPLINGLAIGGVYALFALGYTLVFSILGVINFAHGAVFTLGAYLTYALVGGRFSFNGLLANAALPFSLPFALALLLGSLLAGGASLLIEQVAFRPLRRRQADPLLTLISSLGVAVFIVNLIQILVGAEIYTFPSNIYGDLPSAINLGSSDRPIQIRTVQIILFVVAIAMFSLLTWLINGTRVGHALKAVAEDATTASLLGIDPDRYIRLTFFLSGVLGGLAGTLVGTSVSITGPYFGIAYGLKGLSVMVLGGLGNIPGTIAGGLLLGLAEAWVPPQWSGYRDAVAFALLFAMLLIRPQGLFSRARTEKV

SEQ ID NO: 906 - DNA, 1011 bp, Rhizobium loti
  CDS (1)..(1011)
atgccaaatggtggaacgcgaacaaggacgcggcgctcccggtcctcgcacagggcggtcaggttccggccaacaagtagaaaccccagcaagcgaagtggtcgcgctgatgcgaccacttctacgccgcagaggtggtcgacgctcatgcaaatcgtcctgaattgtctctcgctcacgtcgttctacctttgcttcgccctgggcctggcattggtgttcggagtgatgcggatcatcaacttcgctcacggcgagttcttcatgatcggcgcctacgcgacgtatttgtgcgtcgccacgcttgcaccccaaatcggaggaccaagcgcctggctcgtcggcgcaatcgtggcagcagggataaccgggctgctaggtgccgtgctttacaggacggtggtcgttccattggctgacaagccgcttgcgattttcattgcgacgctcgcgctctcgtacgttctgcagacgattgtcgtccagatattcggtccggttggcctctccatctcgcccccactgcgcggcgtcgtgagcgtgggaggggcaatcctcccagcctcgcgggcaatggtcattgtagccgcggccgccctttcaataggtttatggatctacctcatgagaactgaatcaggtcgtcgcatccgcgcggtcgctcagaatcctcgaggcgcattgctgcagggcattaagacgcggaatgttggcaatctgacgctgattatcggatcggggatcgcaggcatctgcggggcagcgatgggaccgataagccagatatcgccctacatgggtggtcctgctctctggaaagcgttcatcatcataattgtgggcgggatcggcaatgtctggggagcggtggcggcggcggcaatctttggggtgcttgatacacttatgtcgcagttcggcggcgggcgctttcttgctctgacgagtgcggccatcatgctgttcgtccttagcgtaaaaccctccggtctattcggggaaaaagaatga

SEQ ID NO: 907 - protein, 336 aa, Rhizobium loti
MPNGGTRTRTRRSRSSHRAVRFRPTSRNPSKRSGRADATTSTPQRWSTLMQIVLNCLSLTSFYLCFALGLALVFGVMRIINFAHGEFFMIGAYATYLCVATLAPQIGGPSAWLVGAIVAAGITGLLGAVLYRTVVVPLADKPLAIFIATLALSYVLQTIVVQIFGPVGLSISPPLRGVVSVGGAILPASRAMVIVAAAALSIGLWIYLMRTESGRRIRAVAQNPRGALLQGIKTRNVGNLTLIIGSGIAGICGAAMGPISQISPYMGGPALWKAFIIIIVGGIGNVWGAVAAAAIFGVLDTLMSQFGGGRFLALTSAAIMLFVLSVKPSGLFGEKE

SEQ ID NO: 908 - DNA, 897 bp, Rhizobium loti
  CDS (1)..(897)
atgagcaaccagatcatccagggcatcctgcttggcggctactatgcgctgatcgcctgcggcctgtccttcatgttctcggtgatgcgcatcatcaacctcgcccatggcagcctcgccgtgttcgcggcctttgcgctgtggtggctggcctcgcggttccatgtctcgccgtttgtcggcctgctcatcgtgctgccgctgatggcggcgatcggctgggcgctgcagcgcttcttgctcgagcgcagcgcgcgcggcggtgcgctgctgccgatcctgaccacgtttgggctggccatcgtcatcgacaacatgctgttcgagcagttcggcgccgacacccgctcactggcaccctatatcggcagcctgtcctatgattcctgggagtggccgggcagcatctatgtcggcaagctggccgtgatcatgttcgccaccgccgtgatcctgctgggagggctgcagctgttcctcacccgcacccggcttggccgctcgatccgcgcaacgtcggaagattccgacacggccggcctggtcggcgtcgatgcgcgtcgcgccaatgccatagccgcttccatcgccatggtcacggtcggccttgccggcgcgttcctgggcatgcgcgccaccttcgatccctatgccggcgcgccgcaactgctgttcgctttcgaagccgcagtgatcggcggcgccggttcgctgtggggcacgctggtcggcggcatcgtgctggcgcttgcgcagacacttggcgcgcaagtgcatccgcaaggctttctgatcggcggccacacggtgttcctcgtcgtgctcttcgtgcggctgtccacgtcgggccttggcctgcgcggcctgttgcgccttccttcccggagcgcgtcatga

SEQ ID NO: 909 - protein, 298 aa, Rhizobium loti
MSNQIIQGILLGGYYALIACGLSFMFSVMRIINLAHGSLAVFAAFALWWLASRFHVSPFVGLLIVLPLMAAIGWALQRFLLERSARGGALLPILTTFGLAIVIDNMLFEQFGADTRSLAPYIGSLSYDSWEWPGSIYVGKLAVIMFATAVILLGGLQLFLTRTRLGRSIRATSEDSDTAGLVGVDARRANAIAASIAMVTVGLAGAFLGMRATFDPYAGAPQLLFAFEAAVIGGAGSLWGTLVGGIVLALAQTLGAQVHPQGFLIGGHTVFLVVLFVRLSTSGLGLRGLLRLPSRSAS

SEQ ID NO: 910 - DNA, 909 bp, Rhizobium loti
  CDS (1)..(909)
atgagcctgcaatttgtcgtcgatggattgctgacgggttcgatgatcggccttggcgccattggcgtgacgctgacctattcgatcctgcgcttctcgaattttgcccatggcgacttcatggcctggggcacctatgcgacgctcgccgtcgtcagcgccattggtgccaccttcggcaaggtagcacccatcgcgccgctgtccttcggctggccgctcctggttgcgctggtcgtcggcatggccttcaccgccttgctggccctgctgctcgacagagtgctgttctcgcggctgcgctcccagggccaggcgattatcgtggtgatggcgagcttcggtgcctcgatggcgttgaggagcctgctcgaattcaccttcagctcgcggccgacctatttcagccgggcgatccagattgccatgccggtcggcttcggcatccgcgtcacccccgaccagatcgcgcttctgctgctgaccacggtgctggtgctcggcgtgcatctgttgatgacgcgcacgcagaccggccgcgccatgcaggcgctcagccagaacgcggcgctggcccgcatcgtcggcatcgacgtcgccagcgtcgtgcgcgtcacctggatcatcggcggcgcgctcgcctgcgtcgccggcgtgatgatcggcatcctggtgcagatccgtccgttcatgggcttcgacatgctgctgccgatgttcgccgccgccatcctcggcggcatcggcagcattccgggtgcggtgctcggcgggctgatcatcgggctcgccgaggccggcgcggtgcagctgatcggcgccgaatggcgcgccgccgtctccttcatcatcctgatggcggtgctgttcgtgcggccgatcggccttttcggagttcgggaaagatga

SEQ ID NO: 911 - protein, 302 aa, Rhizobium loti
MSLQFVVDGLLTGSMIGLGAIGVTLTYSILRFSNFAHGDFMAWGTYATLAVVSAIGATFGKVAPIAPLSFGWPLLVALVVGMAFTALLALLLDRVLFSRLRSQGQAIIVVMASFGASMALRSLLEFTFSSRPTYFSRAIQIAMPVGFGIRVTPDQIALLLLTTVLVLGVHLLMTRTQTGRAMQALSQNAALARIVGIDVASVVRVTWIIGGALACVAGVMIGILVQIRPFMGFDMLLPMFAAAILGGIGSIPGAVLGGLIIGLAEAGAVQLIGAEWRAAVSFIILMAVLFVRPIGLFGVRER

SEQ ID NO: 912 - DNA, 900 bp, Rhizobium loti
  CDS (1)..(900)
atgatcgccgatttcgactaccagttcttcatcgaagtgctcgtcggcggcctgctctccggcgtcatgtactcgctggtcgcgatcggcttcgtgctgatctacaagacatcaggcgtgctcaatttcgcgcaaggcgcgctgctcttgttcgcggcactcaccttcgtcagcctcgtcgaacgcggtgttcccttcgcgctggcgctggtggccaccttcgccatcatggtggcgatcggcatcgccatcgagcgcacggtgctcaggccgctcaccaacaagccgccgatcacgctcttcatggccacgctcggcctgtcctacatcatcgagggcgccgcccagttgatctggggcacgcaggtccatggcctcgacctcggcatcgaggatgtgccgctggaagtcggcggtgtgctgatcagccagttcgacatcttcgcggctgtggtcgccgccggcatggttctgctgctgtcgctgttcttccgctacacccgcatcggcctctccttccgcgccgtcgccgacgatcagttcgccgccctagcggtcggcctcaggctgccgctgatctgggcgaccgtctgggccgcggccggcctcgtcgcgctggtcgcgggactgctctggggcgcccgcctcggcgtgcagttctcactgtccctggtggtgctcaaggcgctgccggtgctggtgcttggcggcttcgattcgatcctcggcgccatcgtcggcggcctcttgatcggcgccagcgagaagctcgccgaggtctatatcggcgactatttcggcggcggcatcgagagctggttcgcctatgtcgtggcgcttgccttcctcctgatccgtccctccggcctgttcggccagaagctcgtggagagggtctga

SEQ ID NO: 913 - protein, 299 aa, Rhizobium loti
MIADFDYQFFIEVLVGGLLSGVMYSLVAIGFVLIYKTSGVLNFAQGALLLFAALTFVSLVERGVPFALALVATFAIMVAIGIAIERTVLRPLTNKPPITLFMATLGLSYIIEGAAQLIWGTQVHGLDLGIEDVPLEVGGVLISQFDIFAAVVAAGMVLLLSLFFRYTRIGLSFRAVADDQFAALAVGLRLPLIWATVWAAAGLVALVAGLLWGARLGVQFSLSLVVLKALPVLVLGGFDSILGAIVGGLLIGASEKLAEVYIGDYFGGGIESWFAYVVALAFLLIRPSGLFGQKLVERV

SEQ ID NO: 914 - DNA, 906 bp, Rhizobium loti
  CDS (1)..(906)
atgctctatttcttccagcaggtgctgaacgggctgcattccggcgcgctctatgcgttgctcgccttcggctacgtgctgatcaacggcatcctgcaccgcaccaacctcgcctatggcgcgctgttcgccttcagcggacaggcaatgatcctgagcgtcgccttcggctaccaggtgctgtggctgacgctgctggtgtcggtgctgttcggcgtggtcgcggcattcctttatgccgcgctgatcagccatgtcctgtcgcgcagcgtcttcgaaccgttggccgaccgctcgcccaacgccatcgtggtgacgacgctgggcatcctgatcgtgctgtcggaagcaagtcgcatcgcggccgacacgcatgatctgtggctgccgccaatgctggcacagcccatcgttttcgccgaaggcgccggcttcaaggcgacgctgacgctgatccaggtgctcgactgcgcggtggtgctggcggcggtcgcactcgccacctcagcgtttgcccgctccagcttcggccggcgctggcgcgccgtgtccgacgacccgcgcgccgccgccctgtgcggcgtcgacgtgcgcggcgtgttccgccatgccgtgctgctcggcggcttttgcgccgcgctggccggcgtcatggccagcctctactacggcaatgtcagcttcggttccggcctcgtctatggcctgaagatcctgttcgtgacggcggtcggcggctatctctcgccgccacgggcagcgcttggcgcggccgccttcggcatggccgaatcactgtgggccggttatttcccgatcgaatggcgcgatgcgtggatgtatctgttcctggtggccatgctgatcctcatcggcgccggtcgcgacaccggcaaggtcgtctga

SEQ ID NO: 915 - protein, 301 aa, Rhizobium loti
MLYFFQQVLNGLHSGALYALLAFGYVLINGILHRTNLAYGALFAFSGQAMILSVAFGYQVLWLTLLVSVLFGVVAAFLYAALISHVLSRSVFEPLADRSPNAIVVTTLGILIVLSEASRIAADTHDLWLPPMLAQPIVFAEGAGFKATLTLIQVLDCAVVLAAVALATSAFARSSFGRRWRAVSDDPRAAALCGVDVRGVFRHAVLLGGFCAALAGVMASLYYGNVSFGSGLVYGLKILFVTAVGGYLSPPRAALGAAAFGMAESLWAGYFPIEWRDAWMYLFLVAMLILIGAGRDTGKVV

SEQ ID NO: 916 - DNA, 882 bp, Rhizobium loti
  CDS (1)..(882)
atgcacttcggaccgcatctcctccttgccgccctcgaaggcctcgtcacatcagccgtgctggcgctgacggcgcttggactgtcgctggtgttcggcgtgatgcgggtggtcaacgtcgcgcatggcgagttcttcatgctgggcgccgtgctcgcctgggcaatcacatcagcaatcggcggccatccggcgctcggcttcctagcggcgctggtgatcgcgccgctgatcgtcggtgccattgcgctggtcgccgaacggctggtgttgcgccggctgaactacaatccggaagccaccatcgttgccaccatcggcatgctttacatcatccagcagctggcactgagcttctatggtcccgaagcgcggccggtggagccgccgttcagctaccgcatccttttgccgtggttcggctattccggctacaaactgtcgatcattgccgcctcggcgcttctcttgatcgctacatggctggtgctgacgcgcaccaggatcggcctgatcatgcgcgccacgcagtatgacagcgagacggcgcaagctttcggcattccggtcgaccgcgtctatggcggcgtcttcgcgctcggcgccatgctggcggcgatcgccgcggtgctgatcgtgccgatcagccaggcgcattacctgatggggcaggatccgctgctcttgtccttcatcgtcgtcatcatcggcggcctcggctcgctgcgcggcaccgtcgtcgccgccgtgctgatcggcctgtccgacggcatcatctcgatgttcttctcgccgaccttggccaagatgatcgccacgctgctggtcgccatggtgctggtgttccgcccgcaaggcctgttcgggacggcagcgcgatga

SEQ ID NO: 917 - protein, 293 aa, Rhizobium loti
MHFGPHLLLAALEGLVTSAVLALTALGLSLVFGVMRVVNVAHGEFFMLGAVLAWAITSAIGGHPALGFLAALVIAPLIVGAIALVAERLVLRRLNYNPEATIVATIGMLYIIQQLALSFYGPEARPVEPPFSYRILLPWFGYSGYKLSIIAASALLLIATWLVLTRTRIGLIMRATQYDSETAQAFGIPVDRVYGGVFALGAMLAAIAAVLIVPISQAHYLMGQDPLLLSFIVVIIGGLGSLRGTVVAAVLIGLSDGIISMFFSPTLAKMIATLLVAMVLVFRPQGLFGTAAR

SEQ ID NO: 918 - DNA, 963 bp, Rhizobium loti
  CDS (1)..(963)
atgagcgaagcttcgccggcaaaggcttatgcgctgcatctcggcgtcatcgcgctgctcttcgtgctgagcttcgttctgcccgaatactatcacggcctgctcgcccgcatcatggtgctggcggtgttcgccatgggctacaacatgctgttcggctatgtcggcctgctcagcctcggccatgccatgttcttcggcgccgggctttacggcgccggccttgccatcatccagctcggctggggcgtgcccctggccttcctcggcgggattgccagcggcgcggttctggcgctggtgatcggcctgctggcgttgcgcgccacgggcgtcgccttcatgatcgtcaccatgatgttcgcgcaggtgttttatctcctgatcctctacttcgcggcatggaccggcggcgatcagggccaggtcgtgccgcagccggcgcgcgccctcaatctcggcgcaacctcgctcgacctcaccaacccgaccgtgcgctacatgagcgcgctcgtgctgttctcgctcgtgcttctgctcacgctggccgtcgtccgctctcgctatggccgcgtgctcgtcgccatccgcgagaatgaggagcgcaccaagatgctgggctacgacaccttctccaacaagctcatcgccgtggtcgtctccggcacgatctgcgcggcgtcgggtgccgcctatgcgctgctgttcggctatgtcggctcgagcttcgcgtcggtgcagtattcgatcctgccgctgctgtgggtcttgctcggcggtgccgccacgacgctagggccgctgatcggcaccgtcttcatgtactatgtcatcgacgtctccagcggctacacctcggcctatctcctgatcgtcggcattgcgctcatcctgctggtgctgtttttcccgaaaggcattctcggcagcatccgccagcgctggctcgggtggctgccatga

SEQ ID NO: 919 - protein, 320 aa, Rhizobium loti
MSEASPAKAYALHLGVIALLFVLSFVLPEYYHGLLARIMVLAVFAMGYNMLFGYVGLLSLGHAMFFGAGLYGAGLAIIQLGWGVPLAFLGGIASGAVLALVIGLLALRATGVAFMIVTMMFAQVFYLLILYFAAWTGGDQGQVVPQPARALNLGATSLDLTNPTVRYMSALVLFSLVLLLTLAVVRSRYGRVLVAIRENEERTKMLGYDTFSNKLIAVVVSGTICAASGAAYALLFGYVGSSFASVQYSILPLLWVLLGGAATTLGPLIGTVFMYYVIDVSSGYTSAYLLIVGIALILLVLFFPKGILGSIRQRWLGWLP

SEQ ID NO: 920 - DNA, 867 bp, Agrobacterium tumefaciens
  CDS (1)..(867)
atggattttgctatcattcttttacttcagatcgcgattgcgatcgcgaccattattcttttcagcatcggtctcgctgtcgtgttcgggatgatgcgcgtcatcaatctcgcgcatggcgaattcatcatgctcggcgcgtatggtgcgctcaaaagctacgaggccggtctgaacctctgggtcggcatgctgatcgtcgcgccgcttgtctccgccatttacgggctcgtcgtcgagcgcatcctgatccggcgcctttacggccgtctgatcgatactctgttggcgacatgggggctgagtctttttacggtcggcatggtgacgatgatcttcggaaataccgccggaagcgtccccacgccattgtcgacgctacagatcggccagtacggccttggtatttacaatctgtttatcgtcgccatcacgggtgtcgtgcttctggcgatatacctcgtgctgaaacggaccaatctggggacgctcgcgcgcggcaccatgcaggatgccgatatggtggctgccctcggctataatccgaagacagtctacgctgcgaccttcgccataggcgcagccctcgcgggccttgccggtggattgcttgccccggtaaccggcatcattccgaccatgggggctgccttcgtggcgaaggccttcatcaccgtcatctccggcggcgcggcgatcatacttggtacagggtctacggccgcgatcttcggtgccatcaaccagatcgtgacattcgtttccacacctgttctcggtgaagctgcccttcttctggcggcgatattgcttttgcgcatgttgccgaatggcctgtccggacgctttttcaaagggggcgtataa

SEQ ID NO: 921 - protein, 288 aa, Agrobacterium tumefaciens
MDFAIILLLQIAIAIATIILFSIGLAVVFGMMRVINLAHGEFIMLGAYGALKSYEAGLNLWVGMLIVAPLVSAIYGLVVERILIRRLYGRLIDTLLATWGLSLFTVGMVTMIFGNTAGSVPTPLSTLQIGQYGLGIYNLFIVAITGVVLLAIYLVLKRTNLGTLARGTMQDADMVAALGYNPKTVYAATFAIGAALAGLAGGLLAPVTGIIPTMGAAFVAKAFITVISGGAAIILGTGSTAAIFGAINQIVTFVSTPVLGEAALLLAAILLLRMLPNGLSGRFFKGGV

SEQ ID NO: 922 - DNA, 1716 bp, Pseudomonas resinovorans
  CDS (1)..(1716)
atgggcgtcatcaacctggcccacggcgccttctacatggtcggcgcgttctgccggcctacaccgcgtcctgagcggctcgttctggctcgccgggttggcagcggatcatccgctcggccctatacgcgctgcttatcgaaaccagcatcatgcgccgcctctacaacagcgatcacctcgaccaggtactggcccaccctggcggtggtgttcttcaccaacgagttaatcaccgtgctgttcggccgcagcccaccggccatgcccacgcccgagtggtattcgagcttcgtcgaagtgctgccggggttgatgtacccggtcagccgcttgctgttcatcgccgccggggccgtggtggcgatcgccatgtggctgctgataaaccacacgcgcctgggcatgctgatccgcgccggggccgacgaccacgaaatggtcggcgccctgggggtgaacatcgcacgcctgtacaccctggtgttcgtgttcggctccgtgctttgcggcctcgccgggttcatggccgcacccttgctgtcggtggaaatcggcatgggtgaaaaggtcttgattaccaccttcgtggtcatcgtggtcggcggtgtcggctcggtgcgcggcgccctggccggggccttgctgatcggcatggtcgatggcctggggcgtgcctacatcccgcaattgctggaccaactgttgcccgccgaagtcagcggcaccctgagcggcgggctgatttccgccagcgcctacatcgtcatggccgtggtgttgctggtccgcccccgcggcctgctgcccgcccgtgccttgaggagaaccccatgttcccgtcgagtcctgatcgacctgctttgcctggcgacgttcgccctcctgccgctgctggcctcgctgctgcacgaaccctttctggtcagcctgtttacgcgcctggcgatctacggcatggccgccgccagcctggacctgctgatcggctatggcgcgatgattagcttcggccacgcggccttcttcggcctgggcggctacgtggtgggggtgatcggttttcacacctcccaggccttgccgctgtggggctgggacggttccaacagcgcgctgctcgtttggccgctgtcgctgctggtgtgtgcgctgtttgccgtggtggtgggctacctgtcgctgcgtaccagcggggtgcaattcatcatgattaccctggcgttcggccagatgctctatttcgtcctcagttcgctgtcgctgtatggcggcgacgacggcattttgctcagcgagcgcaacaccctgccgggcatcgacctggataacccggtgcagttctactacctgtgcctgggcctgttggtggcttggctgctgttctgccggcgcctggtcaattcgcgtttcggctacgtgctgcgcggcctcaagcaaagcgaacggcgcagcatcagcctgggcctgcacccgctgcgctatcgcctcggggcgtttgtcatcgccggtgtcggggggggcctggcgggcattctctgggccaactacgcgatgttcgtcagcccggacatgggcgcctggcacaagtccggcgaactgatggcgatggtcatcctcggcggcgtcggcaccctgctggggccggtcctcggcgccgccgtgtacctgggcctggaacagtgctcagcctgtggaccgagcactggctgctga

SEQ ID NO: 923 - protein, 571 aa, Pseudomonas resinovorans
MGVINLAHGAFYMVGAFCRPTPRPERLVLARRVGSGSSARPYTRCLSKPASCAASTTAITSTRYWPTLAVVFFTNELITVLFGRSPPAMPTPEWYSSFVEVLPGLMYPVSRLLFIAAGAVVAIAMWLLINHTRLGMLIRAGADDHEMVGALGVNIARLYTLVFVFGSVLCGLAGFMAAPLLSVEIGMGEKVLITTFVVIVVGGVGSVRGALAGALLIGMVDGLGRAYIPQLLDQLLPAEVSGTLSGGLISASAYIVMAVVLLVRPRGLLPARALRRTPCSRRVLIDLLCLATFALLPLLASLLHEPFLVSLFTRLAIYGMAAASLDLLIGYGAMISFGHAAFFGLGGYVVGVIGFHTSQALPLWGWDGSNSALLVWPLSLLVCALFAVVVGYLSLRTSGVQFIMITLAFGQMLYFVLSSLSLYGGDDGILLSERNTLPGIDLDNPVQFYYLCLGLLVAWLLFCRRLVNSRFGYVLRGLKQSERRSISLGLHPLRYRLGAFVIAGVGGGLAGILWANYAMFVSPDMGAWHKSGELMAMVILGGVGTLLGPVLGAAVYLGLEQCSACGPSTGC

SEQ ID NO: 924 - DNA, 873 bp, Streptomyces coelicolor
  CDS (1)..(873)
atgtcgcagttcttcgacttcaccctctccggactcggagccggcaccacctacgcactggtcgggcttggggtcgccctggtgtaccaagtcaccggcgtgatcaacttcgcgcagggcgacttcgtcatgctcggcgggctgggctgcgcggtgctgcacgaggcgggcacgcccctgtgggcggcggccctgaccgcgatcgccgccaccgctgccgtcggtgccctgctggatctcgtcgtcgtccgacgagcccgggacgccgacggcgaacggctcatcatcttgacgatcggcgcctcggtgacccttgagggcgcggcgctcctcgtgttcggccccgactcccacttcgtcccgtccttctccgagggccgcgcgttcgaggtgttcggcgcccatgtggtccgccagtacgtgtggtgcggggtggccactggggtggcggtcctgctgatgtggctgttcctcaccagaaccctgtggggcaccgcgatgcgcgccacggccatggagccggaggcggtccgcctcgtgggtgtctcgccggcccggatgagcctgctggcgttcaccctggccgcggcgctcggcgcgctcgccggagtgttcctggctccgctccagccgccggacgcgtccgtgggcatccccttcgggctcaagggcttcaccgcggcggtcatcggcggactcgtctccccggcgggtgccgtggccggcgggctgctggtcggactggtggaggcgttcgccaccggatatctcagcagcgagtacaaggacacgctcacctacgggctgctgctcgcggtgctgctgctgcggcccaccgggctgctgcgccgggcgtcggtggtgcgggtatga

SEQ ID NO: 925 - protein, 290 aa, Streptomyces coelicolor
MSQFFDFTLSGLGAGTTYALVGLGVALVYQVTGVINFAQGDFVMLGGLGCAVLHEAGTPLWAAALTAIAATAAVGALLDLVVVRRARDADGERLIILTIGASVTLEGAALLVFGPDSHFVPSFSEGRAFEVFGAHVVRQYVWCGVATGVAVLLMWLFLTRTLWGTAMRATAMEPEAVRLVGVSPARMSLLAFTLAAALGALAGVFLAPLQPPDASVGIPFGLKGFTAAVIGGLVSPAGAVAGGLLVGLVEAFATGYLSSEYKDTLTYGLLLAVLLLRPTGLLRRASVVRV

SEQ ID NO: 926 - DNA, 900 bp, Streptomyces coelicolor
  CDS (1)..(900)
atgaccggcttcctggacagtctgctgggcggcctcgcgctgggctccgtgtacgccctgatcgccctcggcttcgtcaccatcttcaaggcctccggagtcctgagcttcacccacggctcgctgctgctgctcggcgggtacctcgtcgccgtcctccacgacgacctcggcttcgccggggcactcgccgtcgcggtgctcgtgacggcggccgtggccggggccctggaccggctggtgctgcaacgcgtcggcgggagcgacccgcacgccgcccacgtccagaccatcgtcaccatcggcgtcgacatcgtcctggtcaccgacctcgcccggcgcatcggcggcgacctgctgccgctcggcgacccctggggctccgccgtgaccgacctcggcccggtgaccgtggccgacagccgcatcgccgcgatcctggtgtccgccgtcgccatcggcggcgccttcgccctcttccggtacaccccctggggcctgtcgctgcgcgcggcggccgaggaccgggaggccgccgccctcatgggcgtacgcctcacccgcgtacgcaccgccgcctggtgcctggccggcgccctcgccgccctcgccgccgtcttcctggtcgccttcccggcgcccggcctcgaacgcaccaccggccagatcgcgctgaaggccttccccgccgccatcctcggcggcatgacctccccggtcggcgccctggtcggcagcatgctgatcggcctcaccgaggcgttcgtcgccggttaccagtccgacctgcacgtcctcggcgagggcttcggcgacgtcgctccgtacgccgtgatggtgctggtgctgctggtgcgtccggccggactcttcgcggcgaagggagcggcccgtgtctga

SEQ ID NO: 927 - protein, 299 aa, Streptomyces coelicolor
MTGFLDSLLGGLALGSVYALIALGFVTIFKASGVLSFTHGSLLLLGGYLVAVLHDDLGFAGALAVAVLVTAAVAGALDRLVLQRVGGSDPHAAHVQTIVTIGVDIVLVTDLARRIGGDLLPLGDPWGSAVTDLGPVTVADSRIAAILVSAVAIGGAFALFRYTPWGLSLRAAAEDREAAALMGVRLTRVRTAAWCLAGALAALAAVFLVAFPAPGLERTTGQIALKAFPAAILGGMTSPVGALVGSMLIGLTEAFVAGYQSDLHVLGEGFGDVAPYAVMVLVLLVRPAGLFAAKGAARV

SEQ ID NO: 928 - DNA, 26 bp, Artificial sequence
  primer
atgtctgagcagtttttgtatttctt

SEQ ID NO: 929 - DNA, 24 bp, Artificial sequence
  primer
ttatactttctctacctccgggcg

SEQ ID NO: 930 - protein, 364 aa, Artificial sequence
  consensus sequence
  Variant (2)..(22): Xaa in position 2 to 22 is any amino acid
  Variant (24)..(127): Xaa in position 24 to 127 is any amino acid
  Variant (128)..(215): Xaa in position 128 to 215 is any or no amino acid
  Variant (217)..(220): Xaa in position 217 to 220 is any amino acid
  Variant (222)..(232): Xaa in position 222 to 232 is any amino acid
  Variant (234)..(254): Xaa in position 234 to 254 is any amino acid
  Variant (256)..(281): Xaa in position 256 to 281 is any amino acid
  Variant (282)..(287): Xaa in position 282 to 287 is any or no amino acid
  Variant (290)..(294): Xaa in position 290 to 294 is any amino acid
  Variant (296)..(331): Xaa in position 296 to 331 is any amino acid
  Variant (332)..(361): Xaa in position 332 to 361 is any or no amino acid
  Variant (363)..(363): Xaa in position 363 is any amino acid
GXXXXXXXXXXXXXXXXXXXXXGXXXXXXXXXXXXXXXXXXXXXXXXXXXXXXXXXXXXXXXXXXXXXXXXXXXXXXXXXXXXXXXXXXXXXXXXXXXXXXXXXXXXXXXXXXXXXXXXXXXXXXXXXXXXXXXXXXXXXXXXXXXXXXXXXXXXXXXXXXXXXXXXXXXXXXXXXXXXXXXXXXXXXXXXXXXXXXXXXXXXXXXXXXXXXXXXGXXXXAXXXXXXXXXXXGXXXXXXXXXXXXXXXXXXXXXGXXXXXXXXXXXXXXXXXXXXXXXXXXXXXXXXGGXXXXXGXXXXXXXXXXXXXXXXXXXXXXXXXXXXXXXXXXXXXXXXXXXXXXXXXXXXXXXXXXXXXXXXXXPXG

SEQ ID NO: 931 - protein, 43 aa, Artificial sequence
  protein pattern
  Variant (1)..(1): Xaa in position 1 is Thr, Ser, Met or Trp
  Variant (2)..(3): Xaa in position 2 to 3 is any amino acid
  Variant (5)..(8): Xaa in position 5 to 8 is any amino acid
  Variant (9)..(9): Xaa in position 9 is Ala, Ser or Gly
  Variant (10)..(10): Xaa in position 10 is Val, Thr, Ala, Ile, Leu, Gly, Cys or Ser
  Variant (11)..(20): Xaa in position 11 to 20 is any amino acid
  Variant (22)..(30): Xaa in position 22 to 30 is any amino acid
  Variant (31)..(31): Xaa in position 31 is Thr, Ala, Val, Ser, Gly, Ile or Leu
  Variant (32)..(32): Xaa in position 32 is Phe, Trp, Tyr, Val, Ala or Leu
  Variant (33)..(38): Xaa in position 33 to 38 is any amino acid
  Variant (39)..(39): Xaa in position 39 is Ala, Gly, Ser, Thr, Val or Cys
  Variant (40)..(40): Xaa in position 40 is Gly, Ala, Ser, Leu or Cys
  Variant (41)..(41): Xaa in position 41 is Leu, Val, Ile, Phe, Ala, Met or Thr
  Variant (42)..(42): Xaa in position 42 is Ala, Gly, Ser or Thr
  Variant (43)..(43): Xaa in position 43 is Gly, Ala or Ser
XXXGXXXXXXXXXXXXXXXXGXXXXXXXXXXXXXXXXXXXXXX

SEQ ID NO: 932 - protein, 80 aa, Artificial sequence
  protein pattern
  Variant (1)..(1): Xaa in position 1 is Val, Ile, Ala, Leu, Ser, Thr or Met
  Variant (2)..(2): Xaa in position 2 is Leu, Val, Ile, Phe, Ala or Met
  Variant (5)..(9): Xaa in position 5 to 9 is any amino acid
  Variant (10)..(10): Xaa in position 10 is Gly, Val, Ala or Leu
  Variant (11)..(13): Xaa in position 11 to 13 is any amino acid
  Variant (14)..(14): Xaa in position 14 is Gly, Ala, Ser, Thr or Met
  Variant (15)..(15): Xaa in position 15 is Gly, Ala, Ser, Thr or Cys
  Variant (16)..(16): Xaa in position 16 is any amino acid
  Variant (17)..(17): Xaa in position 17 is Leu, Ile, Val, Gly, Ala, Phe, Ser, Met or Thr
  Variant (18)..(18): Xaa in position 18 is Leu, Ile, Val, Phe or Met
  Variant (19)..(37): Xaa in position 19 to 37 is any amino acid
  Variant (38)..(67): Xaa in position 38 to 67 is any or no amino acid
  Variant (68)..(68): Xaa in position 68 is Leu, Ile, Val, Ala, Phe, Thr or Met
  Variant (69)..(69): Xaa in position 69 is Leu, Met, Ile, Val, Phe, Ala or Thr
  Variant (70)..(70): Xaa in position 70 is Ile, Val, Leu, Ala, Phe or Met
  Variant (71)..(72): Xaa in position 71 to 72 is any amino acid
  Variant (73)..(73): Xaa in position 73 is Leu, Met, Ile, Val or Phe
  Variant (74)..(76): Xaa in position 74 to 76 is any amino acid
  Variant (77)..(77): Xaa in position 77 is Pro, Ser or Arg
  Variant (78)..(78): Xaa in position 78 is any amino acid
  Variant (79)..(79): Xaa in position 79 is Gly, Ser, Ala or Arg
  Variant (80)..(80): Xaa in position 80 is Leu, Ile, Met, Val, Phe, Ser, Ala or Thr
XXGGXXXXXXXXXXXXXXXXXXXXXXXXXXXXXXXXXXXXXXXXXXXXXXXXXXXXXXXXXXXXXXXXXXXXXXXXXXXX

SEQ ID NO: 933 - DNA, 2466 bp, Arabidopsis thaliana
  CDS (1)..(2466)
atggaaatgcccggtagaagatctaattacactttgcttagtcaattttctgacgatcaggtgtcagtttccgtcaccggagctcctccgcctcactatgattccttgtcgagcgaaaacaggagcaaccataacagcgggaacaccgggaaagctaaggcggagagaggcggatttgattgggatcctagcggtggtggtggtggtgatcataggttgaataatcaaccgaatcgggttgggaataatatgtatgcttcgtctctagggttgcaaaggcaatccagtgggagtagtttcggtgagagctctttgtctggggattattacatgcctacgctttctgcggcggctaacgagatcgaatctgttggatttcctcaagatgatgggtttaggcttggatttggtggtggtggaggagatttgaggatacagatggcggcggactccgctggagggtcttcatctgggaagagctgggcgcagcagacggaggagagttatcagctgcagcttgcattggcgttaaggctttcgtcggaggctacttgtgccgacgatccgaactttctggatcctgtaccggacgagtctgctttacggacttcgccaagttcagccgaaaccgtttcacatcgtttctgggttaatggctgcttatcgtactatgataaagttcctgatgggttttatatgatgaatggtctggatccctatatttggaccttatgcatcgacctgcatgaaagtggtcgcatcccttcaattgaatcattaagagctgttgattctggtgttgattcttcgcttgaagcgatcatagttgataggcgtagtgatccagccttcaaggaacttcacaatagagtccacgacatatcttgtagctgcattaccacaaaagaggttgttgatcagctggcaaagcttatctgcaatcgtatggggggtccagttatcatgggggaagatgagttggttcccatgtggaaggagtgcattgatggtctaaaagaaatctttaaagtggtggttcccataggtagcctctctgttggactctgcagacatcgagctttactcttcaaagtactggctgacataattgatttaccctgtcgaattgccaaaggatgtaaatattgtaatagagacgatgccgcttcgtgccttgtcaggtttgggcttgatagggagtacctggttgatttagtaggaaagccaggtcacttatgggagcctgattccttgctaaatggtccttcatctatctcaatttcttctcctctgcggtttccacgaccaaagccagttgaacccgcagtcgattttaggttactagccaaacaatatttctccgatagccagtctcttaatcttgttttcgatcctgcatcagatgatatgggattctcaatgtttcataggcaatatgataatccgggtggagagaatgacgcattggcagaaaatggtggtgggtctttgccacccagtgctaatatgcctccacagaacatgatgcgtgcgtcaaatcaaattgaagcagcacctatgaatgccccaccaatcagtcagccagttccaaacagggcaaatagggaacttggacttgatggtgatgatatggacatcccgtggtgtgatcttaatataaaagaaaagattggagcaggttcctttggcactgtccaccgtgctgagtggcatggctcggatgttgctgtgaaaattctcatggagcaagacttccatgctgagcgtgttaatgagttcttaagagaggttgcgataatgaaacgccttcgccaccctaacattgttctcttcatgggtgcggtcactcaacctccaaatttgtcaatagtgacagaatatttgtcaagaggtagtttatacagacttttgcataaaagtggagcaagggagcaattagatgagagacgtcgccttagtatggcttatgatgtggctaagggaatgaattatcttcacaatcgcaatcctccaattgtgcatagagatctaaaatctccaaacttattggttgacaaaaaatatacagtcaaggtttgtgattttggtctctcgcgattgaaggccagcacgtttctttcctcgaagtcagcagctggaacccccgagtggatggcaccagaagtcctgcgagatgagccgtctaatgaaaagtcagatgtgtacagcttcggggtcatcttgtgggagcttgctacattgcaacaaccatggggtaacttaaatccggctcaggttgtagctgcggttggtttcaagtgtaaacggctggagatcccgcgtaatctgaatcctcaggttgcagccataatcgagggttgttggaccaatgagccatggaagcgtccatcatttgcaactataatggacttgctaagaccattgatcaaatcagcggttcctccgcccaaccgctcggatttgtaa

SEQ ID NO: 934 - protein, 821 aa, Arabidopsis thaliana
MEMPGRRSNYTLLSQFSDDQVSVSVTGAPPPHYDSLSSENRSNHNSGNTGKAKAERGGFDWDPSGGGGGDHRLNNQPNRVGNNMYASSLGLQRQSSGSSFGESSLSGDYYMPTLSAAANEIESVGFPQDDGFRLGFGGGGGDLRIQMAADSAGGSSSGKSWAQQTEESYQLQLALALRLSSEATCADDPNFLDPVPDESALRTSPSSAETVSHRFWVNGCLSYYDKVPDGFYMMNGLDPYIWTLCIDLHESGRIPSIESLRAVDSGVDSSLEAIIVDRRSDPAFKELHNRVHDISCSCITTKEVVDQLAKLICNRMGGPVIMGEDELVPMWKECIDGLKEIFKVVVPIGSLSVGLCRHRALLFKVLADIIDLPCRIAKGCKYCNRDDAASCLVRFGLDREYLVDLVGKPGHLWEPDSLLNGPSSISISSPLRFPRPKPVEPAVDFRLLAKQYFSDSQSLNLVFDPASDDMGFSMFHRQYDNPGGENDALAENGGGSLPPSANMPPQNMMRASNQIEAAPMNAPPISQPVPNRANRELGLDGDDMDIPWCDLNIKEKIGAGSFGTVHRAEWHGSDVAVKILMEQDFHAERVNEFLREVAIMKRLRHPNIVLFMGAVTQPPNLSIVTEYLSRGSLYRLLHKSGAREQLDERRRLSMAYDVAKGMNYLHNRNPPIVHRDLKSPNLLVDKKYTVKVCDFGLSRLKASTFLSSKSAAGTPEWMAPEVLRDEPSNEKSDVYSFGVILWELATLQQPWGNLNPAQVVAAVGFKCKRLEIPRNLNPQVAAIIEGCWTNEPWKRPSFATIMDLLRPLIKSAVPPPNRSDL

SEQ ID NO: 935 - DNA, 2427 bp, Arabidopsis thaliana
  CDS (1)..(2427)
atggtaaaggaaactctaattcctccgtcatctacgtcaatgacgaccggaacatcttcttcttcgtctctttcaatgacgttatcctcaacaaacgcgttatcgtttttgtcgaaaggatggagagaggtatgggattcagcagatgcggatttgcagctgatgcgagacagagctaactctgttaagaatctagcatcaacgttcgatagagagatcgagaatttcctcaataactcggcgaggtctgcgtttcccgttggttcaccatcggcgtcgtctttctcaaatgaaattggtatcatgaagaagcttcagccgaagatttcggagtttcgtagggtttattcggcgccggagattagtcgcaaggttatggagagatggggacctgcgagagcgaagcttggaatggatctatcggcgattaagaaggcgattgtgtctgagatggaattggatgagcgtcagggagttttggagatgagtagattgaggagacggcgtaatagtgatagggttaggtttacggagtttttcgcggaggctgagagagatggagaagcttatttcggtgattgggaaccgattaggtctttgaagagtagatttaaagagtttgagaaacgaagctcgttagaaatattgagtggattcaagaacagtgaatttgttgagaagctcaaaaccagctttaaatcaatttacaaagaaactgatgaggctaaggatgtccctccgttggatgtacctgaactgttggcatgtttggttagacaatctgaaccttttcttgatcagattggtgttagaaaggatacatgtgaccgaatagtagaaagcctttgcaaatgcaagagccaacaactttggcgtctgccatctgcacaagcatccgatttaattgaaaatgataaccatggagttgatttggatatgaggatagccagtgttcttcaaagcacaggacaccattatgatggtgggttttggactgattttgtgaagcctgagacaccggaaaacaaaaggcatgtggcaattgttacaacagctagtcttccttggatgaccggaacagctgtaaatccgctattcagagcggcgtatttggcaaaagctgcaaaacagagtgttactctcgtggttccttggctctgcgaatctgatcaagaactagtgtatccaaacaatctcaccttcagctcacctgaagaacaagagagttatatacgtaaatggttggaggaaaggattggtttcaaggctgattttaaaatctccttttacccaggaaagttttcaaaagaaaggcgcagcatatttcctgctggtgacacttctcaatttatatcgtcaaaagatgctgacattgctatacttgaagaacctgaacatctcaactggtattatcacggcaagcgttggactgataaattcaaccatgttgttggaattgtccacacaaactacttagagtacatcaagagggagaagaatggagctcttcaagcattttttgtgaaccatgtaaacaattgggtcacacgagcgtattgtgacaaggttcttcgcctctctgcggcaacacaagatttaccaaagtctgttgtatgcaatgtccatggtgtcaatcccaagttccttatgattggggagaaaattgctgaagagagatcccgtggtgaacaagctttctcaaaaggtgcatacttcttaggaaaaatggtgtgggctaaaggatacagagaactaatagatctgatggctaaacacaaaagcgaacttgggagcttcaatctagatgtatatgggaacggtgaagatgcagtcgaggtccaacgtgcagcaaagaaacatgacttgaatctcaatttcctcaaaggaagggaccacgctgacgatgctcttcacaagtacaaagtgttcataaaccccagcatcagcgatgttctatgcacagcaaccgcagaagcactagccatggggaagtttgtggtgtgtgcagatcacccttcaaacgaattctttagatcattcccgaactgcttaacttacaaaacatccgaagactttgtgtccaaagtgcaagaagcaatgacgaaagagccactacctctcactcctgaacaaatgtacaatctctcttgggaagcagcaacacagaggttcatggagtattcagatctcgataagatcttaaacaatggagagggaggaaggaagatgcgaaaatcaagatcggttccgagctttaacgaggtggtcgatggaggattggcattctcacactatgttctaacagggaacgatttcttgagactatgcactggagcaacaccaagaacaaaagactatgataatcaacattgcaaggatctgaatctcgtaccacctcacgttcacaagccaatcttcggctggtag

SEQ ID NO: 936 - protein, 808 aa, Arabidopsis thaliana
MVKETLIPPSSTSMTTGTSSSSSLSMTLSSTNALSFLSKGWREVWDSADADLQLMRDRANSVKNLASTFDREIENFLNNSARSAFPVGSPSASSFSNEIGIMKKLQPKISEFRRVYSAPEISRKVMERWGPARAKLGMDLSAIKKAIVSEMELDERQGVLEMSRLRRRRNSDRVRFTEFFAEAERDGEAYFGDWEPIRSLKSRFKEFEKRSSLEILSGFKNSEFVEKLKTSFKSIYKETDEAKDVPPLDVPELLACLVRQSEPFLDQIGVRKDTCDRIVESLCKCKSQQLWRLPSAQASDLIENDNHGVDLDMRIASVLQSTGHHYDGGFWTDFVKPETPENKRHVAIVTTASLPWMTGTAVNPLFRAAYLAKAAKQSVTLVVPWLCESDQELVYPNNLTFSSPEEQESYIRKWLEERIGFKADFKISFYPGKFSKERRSIFPAGDTSQFISSKDADIAILEEPEHLNWYYHGKRWTDKFNHVVGIVHTNYLEYIKREKNGALQAFFVNHVNNWVTRAYCDKVLRLSAATQDLPKSVVCNVHGVNPKFLMIGEKIAEERSRGEQAFSKGAYFLGKMVWAKGYRELIDLMAKHKSELGSFNLDVYGNGEDAVEVQRAAKKHDLNLNFLKGRDHADDALHKYKVFINPSISDVLCTATAEALAMGKFVVCADHPSNEFFRSFPNCLTYKTSEDFVSKVQEAMTKEPLPLTPEQMYNLSWEAATQRFMEYSDLDKILNNGEGGRKMRKSRSVPSFNEVVDGGLAFSHYVLTGNDFLRLCTGATPRTKDYDNQHCKDLNLVPPHVHKPIFGW

SEQ ID NO: 937 - DNA, 477 bp, Arabidopsis thaliana
  CDS (1)..(477)
atgggagagattgggtttacagagaagcaagaagctttggtgaaggaatcgtgggagatactgaaacaagacatccccaaatacagccttcacttcttctcacagatactggagatagcaccagcagcaaaaggcttgttctctttcctaagagactcagatgaagtccctcacaacaatcctaaactcaaagctcatgctgttaaagtcttcaagatgacatgtgaaacagctatacagctgagggaggaaggaaaggtggtagtggctgacacaaccctccaatatttaggctcaattcatctcaaaagcggcgttattgaccctcacttcgaggtggtgaaagaagctttgctaaggacattgaaagaggggttgggggagaaatacaatgaagaagtggaaggtgcttggtctcaagcttatgatcacttggctttagccatcaagaccgagatgaaacaagaagagtcataa

SEQ ID NO: 938 - protein, 158 aa, Arabidopsis thaliana
MGEIGFTEKQEALVKESWEILKQDIPKYSLHFFSQILEIAPAAKGLFSFLRDSDEVPHNNPKLKAHAVKVFKMTCETAIQLREEGKVVVADTTLQYLGSIHLKSGVIDPHFEVVKEALLRTLKEGLGEKYNEEVEGAWSQAYDHLALAIKTEMKQEES

SEQ ID NO: 939 - DNA, 1722 bp, Arabidopsis thaliana
  CDS (1)..(1722)
atggtcgataaaccaaatcagataatggaagaagaagggagattcgaagcggaggttgcggaagtgcagacttggtggagctcagagaggttcaagctaacaaggcgcccttacactgcccgtgacgtggtggctctacgtggccatctcaagcaaggctatgcttcgaacgagatggctaagaagctgtggagaacgctcaaaagccatcaagccaacggtacggcctctcgcaccttcggagcgttggaccctgttcaggtgaccatgatggctaaacatttggacaccatctatgtctctggttggcagtgctcgtccactcacacatccactaatgagcctggtcctgatcttgctgattatccgtacgacaccgttcctaacaaggttgaacacctcttcttcgctcagcagtaccatgacagaaagcagagggaggcaagaatgagcatgagcagagaagagaggacaaaaactccgttcgtggactacctaaagcccatcatcgccgacggagacaccggctttggcggcaccaccgccaccgtcaaactctgcaagcttttcgttgaaagaggcgccgctggggtccacatcgaggaccagtcctccgtcaccaagaagtgtggccacatggccggaaaggtcctcgtggcagtcagcgaacacatcaaccgccttgtcgcggctcggctccagttcgacgtgatgggtacagagaccgtccttgttgctagaacagatgcggtcgcagctactctgatccagtcgaacattgacgcgagggaccaccagttcatcctcggtgccactaacccgagccttagaggtaagagtttgtcctcgcttctggctgagggaatgactgtaggcaagaatggtccggcgttgcaatccattgaagatcagtggcttggctcggccggtcttatgactttctcggaagctgtcgtgcaggccatcaagcgcatgaacctcaacgagaacgagaagaatcagagactgagcgagtggttaacccatgcaaggtatgagaactgcctgtcaaatgagcaaggccgagtgttagcagcaaaacttggtgtgacagatcttttctgggactgggacttgccgagaaccagagaaggattctaccggttccaaggctcggtcgcagcggccgtggtccgtggctgggcctttgcacagatcgcagacatcatctggatggaaacggcaagccctgatctcaatgaatgcacccaattcgccgaaggtatcaagtccaagacaccggaggtcatgctcgcctacaatctctcgccgtccttcaactgggacgcttccggtatgacggatcagcagatggttgagttcattccgcggattgctaggctcggatattgttggcagttcataacgcttgcgggtttccatgcggatgctcttgtggttgatacatttgcaaaggattacgctaggcgcgggatgttggcttatgtggagaggatacaaagagaagagaggacccatggggttgacactttggctcaccagaaatggtccggtgctaattactatgatcgttatcttaagaccgtccaaggtggaatctcctccactgcagccatgggaaaaggtgtcactgaagaacagttcaaggagagttggacaaggccgggagctgatggaatgggtgaagggactagccttgtggtcgccaagtcaagaatgtaa

SEQ ID NO: 940 - protein, 573 aa, Arabidopsis thaliana
MVDKPNQIMEEEGRFEAEVAEVQTWWSSERFKLTRRPYTARDVVALRGHLKQGYASNEMAKKLWRTLKSHQANGTASRTFGALDPVQVTMMAKHLDTIYVSGWQCSSTHTSTNEPGPDLADYPYDTVPNKVEHLFFAQQYHDRKQREARMSMSREERTKTPFVDYLKPIIADGDTGFGGTTATVKLCKLFVERGAAGVHIEDQSSVTKKCGHMAGKVLVAVSEHINRLVAARLQFDVMGTETVLVARTDAVAATLIQSNIDARDHQFILGATNPSLRGKSLSSLLAEGMTVGKNGPALQSIEDQWLGSAGLMTFSEAVVQAIKRMNLNENEKNQRLSEWLTHARYENCLSNEQGRVLAAKLGVTDLFWDWDLPRTREGFYRFQGSVAAAVVRGWAFAQIADIIWMETASPDLNECTQFAEGIKSKTPEVMLAYNLSPSFNWDASGMTDQQMVEFIPRIARLGYCWQFITLAGFHADALVVDTFAKDYARRGMLAYVERIQREERTHGVDTLAHQKWSGANYYDRYLKTVQGGISSTAAMGKGVTEEQFKESWTRPGADGMGEGTSLVVAKSRM

SEQ ID NO: 941 - DNA, 1551 bp, Arabidopsis thaliana
  CDS (1)..(1551)
atggacggtgccggagaatcacgactcggtggtgatggtggtggtgatggttctgttggagttcagatccgacaaacacggatgctaccggattttctccagagcgtgaatctcaagtatgtgaaattaggttaccattacttaatctcaaatctcttgactctctgtttattccctctcgccgttgttatctccgtcgaagcctctcagatgaacccagatgatctcaaacagctctggatccatctacaatacaatctggttagtatcatcatctgttcagcgattctagtcttcgggttaacggtttatgttatgacccgacctagacccgtttacttggttgatttctcttgttatctcccacctgatcacctcaaagctccttacgctcggttcatggaacattctagactcaccggagatttcgatgactctgctctcgagtttcaacgcaagatccttgagcgttctggtttaggggaagacacttatgtccctgaagctatgcattatgttccaccgagaatttcaatggctgctgctagagaagaagctgaacaagtcatgtttggtgctttagataaccttttcgctaacactaatgtgaaaccaaaggatattggaatccttgttgtgaattgtagtctctttaatccaactccttcgttatctgcaatgattgtgaacaagtataagcttagaggtaacattagaagctacaatctaggcggtatgggttgcagcgcgggagttatcgctgtggatcttgctaaagacatgttgttggtacataggaacacttatgcggttgttgtttctactgagaacattactcagaattggtattttggtaacaagaaatcgatgttgataccgaactgcttgtttcgagttggtggctctgcggttttgctatcgaacaagtcgagggacaagagacggtctaagtacaggcttgtacatgtagtcaggactcaccgtggagcagatgataaagctttccgttgtgtttatcaagagcaggatgatacagggagaaccggggtttcgttgtcgaaagatctaatggcgattgcaggggaaactctcaaaaccaatatcactacattgggtcctcttgttctaccgataagtgagcagattcccttctttatgactctagttgtgaagaagctctttaacggtaaagtgaaaccgtatatcccggatttcaaacttgctttcgagcatttctgtatccatgctggtggaagagctgtgatcgatgagttagagaagaatctgcagctttcaccagttcatgtcgaggcttcgaggatgactcttcatcgatttggtaacacatcttcgagctccatttggtatgaattggcttacattgaagcgaagggaaggatgcgaagaggtaatcgtgtttggcaaatcgcgttcggaagtggatttaaatgtaatagcgcgatttgggaagcattaaggcatgtgaaaccttcgaacaacagtccttgggaagattgtattgacaagtatccggtaactttaagttattag

SEQ ID NO: 942 - protein, 516 aa, Arabidopsis thaliana
MDGAGESRLGGDGGGDGSVGVQIRQTRMLPDFLQSVNLKYVKLGYHYLISNLLTLCLFPLAVVISVEASQMNPDDLKQLWIHLQYNLVSIIICSAILVFGLTVYVMTRPRPVYLVDFSCYLPPDHLKAPYARFMEHSRLTGDFDDSALEFQRKILERSGLGEDTYVPEAMHYVPPRISMAAAREEAEQVMFGALDNLFANTNVKPKDIGILVVNCSLFNPTPSLSAMIVNKYKLRGNIRSYNLGGMGCSAGVIAVDLAKDMLLVHRNTYAVVVSTENITQNWYFGNKKSMLIPNCLFRVGGSAVLLSNKSRDKRRSKYRLVHVVRTHRGADDKAFRCVYQEQDDTGRTGVSLSKDLMAIAGETLKTNITTLGPLVLPISEQIPFFMTLVVKKLFNGKVKPYIPDFKLAFEHFCIHAGGRAVIDELEKNLQLSPVHVEASRMTLHRFGNTSSSSIWYELAYIEAKGRMRRGNRVWQIAFGSGFKCNSAIWEALRHVKPSNNSPWEDCIDKYPVTLSY

SEQ ID NO: 943 - DNA, 1551 bp, Arabidopsis thaliana
  CDS (1)..(1551)
atggatggcgcaggtgagtcaagactaggaggtgatggtggaggtgacggcagcgtgggggttcagataagacagacgagaatgctgcctgacttccttcaatctgttaatctcaaatacgtaaaacttgggtatcactatttgatttccaatctccttaccctttgcctgtttccactggccgtcgtgatttccgtggaagcttcacaaatgaatcccgatgacttaaaacaactatggatccacttgcaatataacttagtctctattataatctgttcagcaattttggtttttggtctgactgtctacgtgatgactagacccagacctgtttatctcgtggatttttcttgttacttacccccagaccatcttaaagcaccttacgcaaggtttatggagcatagccgtctcactggagactttgacgattctgcgctggagttccagaggaaaatcttggagcgatcaggattgggagaagacacttatgtgcctgaggctatgcactacgttccacctaggatttccatggcagctgccagagaggaagccgagcaagtgatgtttggggcacttgacaatcttttcgctaacactaacgttaaacccaaggatataggcattcttgtcgtgaactgttccctcttcaatcccaccccttcactttcagctatgatcgttaacaaatacaagctgaggggaaatattcgctcgtacaatttggggggtatgggatgctcagctggagttatcgcagtagatttggccaaggatatgctcctagtccacaggaacacgtacgctgtggttgtgagtaccgaaaacataacacagaattggtatttcggaaacaagaagtccatgctcatcccaaactgcttgtttagagttggagggtctgctgtattactcagcaataagtcgagggacaaaagacggagtaaatatcgtttggttcatgttgtgcggacacaccgaggtgcagacgataaggcattccgctgcgtctatcaggagcaagatgataccggcagaacaggtgtgtctctgagtaaagacttaatggctatcgccggcgaaacattgaaaacaaatataactacactcggcccattggtacttccgatttcagagcaaattccattctttatgactctcgtagttaagaaattgttcaacggtaaggttaagccttatataccagatttcaagctagcgtttgaacatttttgtattcatgctgggggacgagctgttatcgatgaactcgaaaagaatcttcaattgagtcctgttcatgtcgaagcctccaggatgacccttcataggttcggtaacacctctagctctagtatttggtatgaacttgcttatatcgaggcgaagggacgtatgagacgcggtaaccgcgtgtggcagattgcattcgggagtggctttaagtgcaactctgctatatgggaagccttacgtcacgttaagccaagcaacaattctccatgggaggattgtatcgataagtacccggtgacactaagttactaa

SEQ ID NO: 944 - protein, 516 aa, Arabidopsis thaliana; identical to SEQ ID NO: 942

SEQ ID NO: 945 - DNA, 951 bp, Arabidopsis thaliana
  CDS (1)..(951)
atggagaaaggtttgacgatgtcttgtgttttggtggtggttgcattcttagccatggttcatgtctctgtttcagttccgttcgtagtgtttcctgaaatcggaacacaatgttctgatgctccaaatgctaacttcacacagcttctcagtaacctctctagctcacctggcttttgcatagaaattggcgagggaaatccaataggcgcttcatggttaataccacttacacaacaagcggaagtagcgtgtgataaggtgacgcagatggaagagttgagtcaaggatacaacattgttggaagagctcaggggagcttagtggctcgaggcttaatcgagttctgcgaaggtgggcctcctgttcacaactatatatccttggctggtcctcatgctggcaccgccgatcttcttcggtgtaatacttctggcttaatttgtgacatagcaaatgggataggcaaggaaaatccctacagcgactttgttcaagataatcttgctcctagtggttatttcaaaaaccctaaaaatgtgacagggtacctgaaagactgtcagtatctacctaagcttaacaatgagagaccatacgaaagaaacacaacttacaaagaccgtttcgcaagtttacagaacctggtttttgtcctgtttgagaacgatacggttattgttccaaaagagtcatcttggttcgggttttatccggatggtgacttaacacatgttctccctgttcaagagacaaagctctatatagaagattggataggtctgaaagcattggttgttgctggaaaagtgcagtttgtgaatgtaaccggtgaccacttaataatggcggacgaagatctcgtcaaatacgtcgtacctcttctccaggatcaacagtctgccccaccaagactcaaccgcaagaccaaggagcccttgcatccttaa

SEQ ID NO: 946 - protein, 316 aa, Arabidopsis thaliana
MEKGLTMSCVLVVVAFLAMVHVSVSVPFVVFPEIGTQCSDAPNANFTQLLSNLSSSPGFCIEIGEGNPIGASWLIPLTQQAEVACDKVTQMEELSQGYNIVGRAQGSLVARGLIEFCEGGPPVHNYISLAGPHAGTADLLRCNTSGLICDIANGIGKENPYSDFVQDNLAPSGYFKNPKNVTGYLKDCQYLPKLNNERPYERNTTYKDRFASLQNLVFVLFENDTVIVPKESSWFGFYPDGDLTHVLPVQETKLYIEDWIGLKALVVAGKVQFVNVTGDHLIMADEDLVKYVVPLLQDQQSAPPRLNRKTKEPLHP

SEQ ID NO: 947 - DNA, 1176 bp, Arabidopsis thaliana
  CDS (1)..(1176)
atggcgacttttgctgaacttgttttatcgacttctcgctgtacatgcccttgccgttcattcactagaaaacccctaattcgtccccctttatctggtctgcgtctccccggtgataccaaaccattgtttcgttccggacttggtcggatttctgttagccggcgtttcctcacggccgttgctcgagctgaatcagaccagcttggtgatgatgaccactcaaagggaattgatagaatccataacttgcagaatgtggaagataagcagaagaaagcaagccagcttaagaaaagagtgatctttggtattggcattggtttacctgttggatgtgttgtgttagctggaggatgggttttcactgtagctttagcatcttctgtttttatcggttcccgcgaatatttcgagcttgttagaagtagaggcatagctaaaggaatgactcctcctccacgatatgtatctcgagtttgctcggttatatgtgcccttatgcccatacttacactgtactttggtaacattgatatattggtgacatctgcagcatttgttgttgcaatagcattgttagtacaaagaggatccccacgttttgctcagctgagtagtacaatgtttggtctgttttactgtggttatctcccttctttctgggttaagcttcgctgtggtttagctgctcctgcgcttaacactggtatcggaaggacatggccaattcttcttggtggtcaagctcattggacagttggacttgtggcaacattgatttctttcagcggtgtaattgcgacagacacatttgcttttctcggtggaaagacttttggtaggacacctcttactagtattagtcccaagaagacatgggaaggaactattgtaggacttgttggttgtatagccattaccatattactctctaaatatctcagttggccacaatctctgttcagctcagtagcttttgggtttcttaacttctttgggtcagtctttggtgatcttactgaatcaatgatcaagcgtgatgctggcgtcaaagactctggttcacttatcccaggacacggtggaatattagatagagttgatagttacattttcaccggcgcattagcttattcattcatcaaaacatccctaaaactttacggagtttga

SEQ ID NO: 948 - protein, 391 aa, Arabidopsis thaliana
MATFAELVLSTSRCTCPCRSFTRKPLIRPPLSGLRLPGDTKPLFRSGLGRISVSRRFLTAVARAESDQLGDDDHSKGIDRIHNLQNVEDKQKKASQLKKRVIFGIGIGLPVGCVVLAGGWVFTVALASSVFIGSREYFELVRSRGIAKGMTPPPRYVSRVCSVICALMPILTLYFGNIDILVTSAAFVVAIALLVQRGSPRFAQLSSTMFGLFYCGYLPSFWVKLRCGLAAPALNTGIGRTWPILLGGQAHWTVGLVATLISFSGVIATDTFAFLGGKTFGRTPLTSISPKKTWEGTIVGLVGCIAITILLSKYLSWPQSLFSSVAFGFLNFFGSVFGDLTESMIKRDAGVKDSGSLIPGHGGILDRVDSYIFTGALAYSFIKTSLKLYGV

SEQ ID NO: 949 - DNA, 2871 bp, Arabidopsis thaliana
  CDS (1)..(2871)
atggcaagtatgatcgtgaagacaacgccggagctcttcaaaggaaatggagtgttccgtacggaccatctcggagaaaaccgaatggttagtcgatcaaaccggctaggtgatggatcaaaccgtttccctagaaccggtacaatccattgccaacggttaagcatagcaaagaccggtttgcatcgtgagacgaaggctcgagccatacttagccctgtgtccgatccggccgcttccatagcccaaaagcgagtattcacctttggaaaaggaagaagcgaaggcaacaagggcatgaagtccttgttgggagggaaaggagccaacctggcggagatggctagcataggcttgtcggtgccgccggggctaaccatatcgacggaggcttgtcagcagtatcagatcgccggcaaaaagcttccagaaggtttatgggaagagatcttagaaggtcttagcttcatcgaacgtgacattggagcttccctcgctgatccctccaagccactcctcctctctgttcgctccggcgccgccatctcaatgcctggtatgatggacactgtacttaaccttggcttgaacgaccaagtcgtcgttggtctggccgcaaaaagcggagagcgttttgcttacgattcgttccggcgttttcttgatatgtttggtgatgttgtgatgggaattccacacgccaagtttgaagagaagttagagagaatgaaggagaggaaaggagttaaaaatgacactgacttaagcgcggctgatctcaaggaattggttgagcagtacaagagtgtttacttagaggccaagggtcaagagtttccttcagatccaaagaagcaattggagctagcgattgaagcggtattcgattcttgggatagcccgagagcgaacaagtacagaagtattaaccagataactggattgaaaggaaccgcggttaacattcagtgtatggtgtttggaaacatgggggacacttcagggactggtgttctcttcactaggaaccctagcacaggagagaagaagctttatggcgagtttctagttaatgctcagggagaggatgtggttgcagggataagaacaccagaagatttggatacaatgaagagatttatgcctgaggcttacgctgaacttgttgagaactgcaacatcttagaaagacattacaaagacatgatggatattgaattcacagtacaagaagagagattgtggatgctgcaatgcagagcgggtaagcgaacgggtaaaggcgccgtgaagatagcagttgatatggtaggtgaagggcttgttgagaaatcttctgctatcaaaatggtggagcctcaacatcttgatcaactacttcacccacagtttcatgatccatcggggtatcgtgaaaaagtggtggccaaaggcttacctgcgtcaccaggagcggcggttggacaggttgtgttcacggcggaggaagccgaagcttggcattctcagggtaaaactgtgattctggttcgaactgagacaagccctgacgatgtgggaggtatgcacgcagcggaaggtatattgacggctagaggaggaatgacgtcacacgcggctgttgttgctcgcggttggggaaaatgttgcattgctggttgttccgagattcgtgtcgacgagaaccacaaggttctattgattggagatttgacgattaatgaaggcgaatggatctcaatgaacggatcaaccggtgaggttatattagggaaacaagcattggctcctccggctttaagtccagatttggagactttcatgtcctgggctgatgcaatcagacgtctcaaggttatggcgaatgcggatacacctgaagacgccattgcagctaggaaaaacggagctcaaggaatcgggctttgtaggacagagcatatgttctttggagcagataggattaaagcagtgagaaagatgataatggcggtaacaacagagcaaagaaaagcttctctcgacatcttgcttccttaccaacgttcggatttcgaagggatcttccgtgctatggatggtttaccggtaacaatccgtttgttagaccctccgcttcacgagtttctcccggaaggcgacttggacaacattgtacatgagctagctgaagaaactggtgtgaaagaagatgaagtcttgtcacggatagagaaactctctgaagtgaatccaatgcttggtttccgcggttgcaggctcggaatatcgtatccagagctaacggagatgcaagcgcgtgcaatttttgaagctgcagcgtcaatgcaggaccaaggtgttactgtcattcctgagattatggttccacttgtaggaactcctcaggaattgggtcaccaagttgatgtaattcgtaaagttgcaaagaaagtatttgctgagaagggtcataccgtgagctacaaggttgggacaatgattgagatccctcgagccgcgctcattgcagatgagattgcgaaagaggcggagtttttctcgttcgggacaaacgacttgacgcagatgacgtttggatacagtagagacgatgtcggcaagtttctaccgatttacctcgccaaaggaatcttacagcacgacccttttgaggttcttgatcagcaaggtgtagggcaattgatcaagatggcgacagaaaaaggacgagcagctaggcctagcctcaaggttgggatatgtggagaacatggaggagatccatcttctgtgggattctttgctgaagcaggacttgactatgtctcttgttctcctttcagggttccaattgcaaggcttgcagctgctcaagtagttgttgcatga

SEQ ID NO: 950 - protein, 956 aa, Arabidopsis thaliana
MASMIVKTTPELFKGNGVFRTDHLGENRMVSRSNRLGDGSNRFPRTGTIHCQRLSIAKTGLHRETKARAILSPVSDPAASIAQKRVFTFGKGRSEGNKGMKSLLGGKGANLAEMASIGLSVPPGLTISTEACQQYQIAGKKLPEGLWEEILEGLSFIERDIGASLADPSKPLLLSVRSGAAISMPGMMDTVLNLGLNDQVVVGLAAKSGERFAYDSFRRFLDMFGDVVMGIPHAKFEEKLERMKERKGVKNDTDLSAADLKELVEQYKSVYLEAKGQEFPSDPKKQLELAIEAVFDSWDSPRANKYRSINQITGLKGTAVNIQCMVFGNMGDTSGTGVLFTRNPSTGEKKLYGEFLVNAQGEDVVAGIRTPEDLDTMKRFMPEAYAELVENCNILERHYKDMMDIEFTVQEERLWMLQCRAGKRTGKGAVKIAVDMVGEGLVEKSSAIKMVEPQHLDQLLHPQFHDPSGYREKVVAKGLPASPGAAVGQVVFTAEEAEAWHSQGKTVILVRTETSPDDVGGMHAAEGILTARGGMTSHAAVVARGWGKCCIAGCSEIRVDENHKVLLIGDLTINEGEWISMNGSTGEVILGKQALAPPALSPDLETFMSWADAIRRLKVMANADTPEDAIAARKNGAQGIGLCRTEHMFFGADRIKAVRKMIMAVTTEQRKASLDILLPYQRSDFEGIFRAMDGLPVTIRLLDPPLHEFLPEGDLDNIVHELAEETGVKEDEVLSRIEKLSEVNPMLGFRGCRLGISYPELTEMQARAIFEAAASMQDQGVTVIPEIMVPLVGTPQELGHQVDVIRKVAKKVFAEKGHTVSYKVGTMIEIPRAALIADEIAKEAEFFSFGTNDLTQMTFGYSRDDVGKFLPIYLAKGILQHDPFEVLDQQGVGQLIKMATEKGRAARPSLKVGICGEHGGDPSSVGFFAEAGLDYVSCSPFRVPIARLAAAQVVVA

SEQ ID NO: 951 - DNA, 1680 bp, Arabidopsis thaliana
  CDS (1)..(1680)
atggctaatcaccaccgacttttacgcggcggcggatctccggccataatcggtggcagaatcacactcacagctttcgcttccactatcgcactcttcctcttcactctctccttcttcttcgcttcagattctaacgattctcctgatctccttcttcccggtgttgagtactctaatggagtcggatctagaagatccatgttggatatcaaatcggatccgcttaagccacggttgattcagatccggaaacaagctgatgatcatcggtcattagcattagcttatgcttcttacgcgagaaagcttaagctcgagaattcgaaactcgtcaggatcttcgctgatctttcgaggaattacacggatctgattaacaaaccgacgtatcgagctttgtatgattctgatggagcctcgattgaagaatctgtgcttaggcaatttgagaaagaagttaaggaacggattaaaatgactcgtcaagtgattgctgaagctaaagagtcttttgataatcagttgaagattcagaagctgaaagatacgattttcgctgttaacgaacagttaactaatgctaagaagcaaggtgcgttttcgagtttgatcgctgcgaaatcgattccgaaaggattgcattgtcttgctatgaggctgatggaagagaggattgctcaccctgagaagtatactgatgaagggaaagatagaccgcgggagctcgaggatccgaatctttaccattacgctatattttcggataatgtgattgcggcttcggtggttgtgaactctgctgtgaagaatgctaaggagccgtggaagcatgtttttcacgttgtgactgataagatgaatcttggagctatgcaggttatgtttaaactgaaggagtataaaggagctcatgtagaagttaaagctgttgaggattatacgtttttgaactcttcgtatgtgcctgtgttgaagcagttagaatctgcgaatcttcagaagttttatttcgagaataagctcgagaatgcgacgaaagataccacgaatatgaagttcaggaaccccaagtatttatctatattgaatcacttgaggttttatttacccgagatgtacccgaaactacataggatactgtttttggacgatgatgtggttgtgcagaaggatttaacgggtctgtgggagattgatatggatgggaaagtgaatggagctgtagagacttgttttgggtcgtttcatcggtacgctcaatacatgaatttctcacatcctttgatcaaagagaagtttaatcccaaagcatgtgcgtgggcgtatggaatgaacttctttgatcttgatgcttggagaagagagaagtgcacagaagaatatcactactggcaaaatctgaacgagaacagggctctatggaaactggggacgttaccaccgggactgatcaccttttactcaaccacaaagccgctggacaaatcatggcatgtgcttgggctgggttacaatccgagcattagcatggatgagatccgcaacgctgcagtggtacacttcaacggtaacatgaagccatggcttgacatagctatgaaccagtttcgaccactttggaccaaacacgtcgactatgacctcgagtttgttcaggcttgcaattttggcctctga

SEQ ID NO: 952 - protein, 559 aa, Arabidopsis thaliana
MANHHRLLRGGGSPAIIGGRITLTAFASTIALFLFTLSFFFASDSNDSPDLLLPGVEYSNGVGSRRSMLDIKSDPLKPRLIQIRKQADDHRSLALAYASYARKLKLENSKLVRIFADLSRNYTDLINKPTYRALYDSDGASIEESVLRQFEKEVKERIKMTRQVIAEAKESFDNQLKIQKLKDTIFAVNEQLTNAKKQGAFSSLIAAKSIPKGLHCLAMRLMEERIAHPEKYTDEGKDRPRELEDPNLYHYAIFSDNVIAASVVVNSAVKNAKEPWKHVFHVVTDKMNLGAMQVMFKLKEYKGAHVEVKAVEDYTFLNSSYVPVLKQLESANLQKFYFENKLENATKDTTNMKFRNPKYLSILNHLRFYLPEMYPKLHRILFLDDDVVVQKDLTGLWEIDMDGKVNGAVETCFGSFHRYAQYMNFSHPLIKEKFNPKACAWAYGMNFFDLDAWRREKCTEEYHYWQNLNENRALWKLGTLPPGLITFYSTTKPLDKSWHVLGLGYNPSISMDEIRNAAVVHFNGNMKPWLDIAMNQFRPLWTKHVDYDLEFVQACNFGL

SEQ ID NO: 953 - DNA, 1482 bp, Arabidopsis thaliana
  CDS (1)..(1482)
atgtcactcatgttttcttcccctgtcgtcaccccagcactcggatctttcaccttctcatctcgaccacgctccaattacatcgtgatgtccgccgtccgatctaactctgcttcgacgtgtcctatactgaccaagtttcagaaagactgcgccactcctacaccgtacctacgcaacgtagccaacgccattgctgatgacatgcgagatggtctagctgttgaaggaggaggagatctcgagatgatcttgacttttgttgacgctttgccttctgggaatgaggaagggttgttctatgcattggatttaggaggtacaaattttcgggtgcgtagcgtgcaattaggaggaaagaaagagcgagtcttagctaccgaatctgaacaaatatctatttctcaaaagcttatgattggtacaagtgaggagcttttcgggttcattgcttcaaagcttgcaaattttgttgcaaaggagaagccaggtcggtttcttttagaagaagggaggaaaagggagttagggtttaccttttcattccctgtgaagcaaacctctattgattcaggcacattaagcaaatggactaaaggctttaaagtgtctggaatggaaggaaaaaatgtggttgcttgtttaaatgaagctatggaagcacatggactcgatatgcgagtttctgctcttgtaaatgatggagtgggaacattagctggagcaaggtattgggatgaggatgtgatggtcggtgtgattcttggcactgggaccaatgcttgttatgtagaacagaaacatgcaattcctaaactccgaagcaaatcttcttctggaacaacgatcataaacactgagtggggagggttctctaagattcttccgcaaaccatttttgacctagagatggatgagacaagcctgaatcctggtgaacatttatatgagaagatgatctcagggatgtaccttggtgaaattgtaaggagggttttgctccatatgtgtgaaactagtgacttgtttggacacttcgctcctgccaaactctccactcctttggcactcaggaccgagcatctatgcaaaatgcaagaggacaatacagatgatcttcgggatgttggatcaatcctatacgactttttagatgtggaggcgaatatgaatgcaaggaggagagtggtggaagtgtgtgacacagtagtgaaacgcggagggcgtctagcaggagctggtatagtggcaattctggagaagattgaaaaagatactaaaagaatgggttcaggtaaaagaaccgttgtggctatggacggtgcactgtatgagaagtacccacaatatcgacagtatatgcaagacgcactagtcgagcttcttggccataagcttgcaagtcacgtcgcgatcaaacataccaaagacgtgtctgggctcggtgctgctcttttggcggccactaactccatttactag

SEQ ID NO: 954 - protein, 493 aa, Arabidopsis thaliana
MSLMFSSPVVTPALGSFTFSSRPRSNYIVMSAVRSNSASTCPILTKFQKDCATPTPYLRNVANAIADDMRDGLAVEGGGDLEMILTFVDALPSGNEEGLFYALDLGGTNFRVRSVQLGGKKERVLATESEQISISQKLMIGTSEELFGFIASKLANFVAKEKPGRFLLEEGRKRELGFTFSFPVKQTSIDSGTLSKWTKGFKVSGMEGKNVVACLNEAMEAHGLDMRVSALVNDGVGTLAGARYWDEDVMVGVILGTGTNACYVEQKHAIPKLRSKSSSGTTIINTEWGGFSKILPQTIFDLEMDETSLNPGEHLYEKMISGMYLGEIVRRVLLHMCETSDLFGHFAPAKLSTPLALRTEHLCKMQEDNTDDLRDVGSILYDFLDVEANMNARRRVVEVCDTVVKRGGRLAGAGIVAILEKIEKDTKRMGSGKRTVVAMDGALYEKYPQYRQYMQDALVELLGHKLASHVAIKHTKDVSGLGAALLAATNSIY

SEQ ID NO: 955 - DNA, 1119 bp, Arabidopsis thaliana
  CDS (1)..(1119)
atggcagagcgtgtgtctctcacactcaacggaaccctcctttctcctcctcccacaacaacaacaacaacaatgtcttcttctctccgatctaccaccgccgcttctcttctcctccgctcctcctcctcctcctccagatccactctcactctctccgcttcctcctctctctccttcgtcagatctctcgtctcttctccacgtctctcttcttcttcatccctctctcagaagaaatatcgaattgcgtcggtgaatcggagtttcaactccaccaccgccgctactaaatcttcatcttcagatcctgatcagttgaagaacgctagagaagatatcaaagagcttctcagcaccaaattctgccatccgattttggttagattaggttggcatgatgctggtacgtataacaagaacattaaggaatggccacaaagaggtggagctaatggaagtttgagattcgatattgagcttaaacatgctgctaacgctggtcttgtgaatgctttaaacttgattaaggatatcaaagagaaatactctgggatcagttatgctgatttgttccagttagctagtgctactgctatagaggaagctggaggaccgaaaataccgatgaaatatggtagagttgatgcctctggtcctgaggattgtccagaagaaggaaggcttccagatgctggtcctccttcacctgctactcatctcagagaagttttttacagaatgggattagatgacaaggacatagttgcattatctggtgctcacacgttaggaagatctaggccagaacgtagtggttgggggaagcctgagacgaagtacacgaaagaaggacctggagcaccaggaggacagtcatggacaccagagtggctgaagtttgataattcttacttcaaggagatcaaggaaaagagagatgaagatctccttgtcctacccactgatgctgccatcttcgaagattcttctttcaaggtctatgctgaaaagtatgctgcagatcaggatgcatttttcaaggattacgctgtagcccatgcgaagctcagcaatcttggagcagaatttaaccctccggagggtatcgttatctaa

SEQ ID NO: 956 - protein, 372 aa, Arabidopsis thaliana
MAERVSLTLNGTLLSPPPTTTTTTMSSSLRSTTAASLLLRSSSSSSRSTLTLSASSSLSFVRSLVSSPRLSSSSSLSQKKYRIASVNRSFNSTTAATKSSSSDPDQLKNAREDIKELLSTKFCHPILVRLGWHDAGTYNKNIKEWPQRGGANGSLRFDIELKHAANAGLVNALNLIKDIKEKYSGISYADLFQLASATAIEEAGGPKIPMKYGRVDASGPEDCPEEGRLPDAGPPSPATHLREVFYRMGLDDKDIVALSGAHTLGRSRPERSGWGKPETKYTKEGPGAPGGQSWTPEWLKFDNSYFKEIKEKRDEDLLVLPTDAAIFEDSSFKVYAEKYAADQDAFFKDYAVAHAKLSNLGAEFNPPEGIVI

SEQ ID NO: 957 - DNA, 640 bp, Arabidopsis thaliana
  CDS (1)..(639)
  misc_feature (640)..(640): n is a, g, c or t
atggctgcttcaagtgctgtcaccgcaaactacgtcctcaagccacctccattcgcactggatgctttggagccgcatatgagcaaacaaactctggagtttcactggggaaaacatcacagagcttacgtggacaacctcaagaaacaggttcttggaaccgagcttgaaggcaagcccttagagcacattatccacagcacttacaacaatggtgatctcctccctgctttcaacaacgctgctcaggcgtggaaccacgagttcttctgggagtcaatgaaaccaggtggtggaggaaaaccatcaggagagcttcttgctttgcttgaaagagatttcacttcttatgagaagttctatgaagagttcaatgctgctgcagccactcagtttggagctggctgggcctggcttgcttattcaaatgaaaaactcaaagtagtgaaaactcccaatgctgtgaatccccttgtgctcggctctttcccattgcttaccattgatgtctgggagcatgcttactaccttgacttccagaaccgaagaccagattacataaagacattcatgaccaatcttgtgtcttgggaagctgtaagtgccagacttgaggccgccaaggctgcttctgcttaan

SEQ ID NO: 958 - protein, 212 aa, Arabidopsis thaliana
MAASSAVTANYVLKPPPFALDALEPHMSKQTLEFHWGKHHRAYVDNLKKQVLGTELEGKPLEHIIHSTYNNGDLLPAFNNAAQAWNHEFFWESMKPGGGGKPSGELLALLERDFTSYEKFYEEFNAAAATQFGAGWAWLAYSNEKLKVVKTPNAVNPLVLGSFPLLTIDVWEHAYYLDFQNRRPDYIKTFMTNLVSWEAVSARLEAAKAASA

SEQ ID NO: 959 - DNA, 2656 bp, Arabidopsis thaliana
  CDS (263)..(2656)
atggcgtctttctttgatctcgtatacataagctggattggtttcttaaacaaattcctctccttttgggtcttctgggtttgccttgtaagtgtttgtgtttttgcctctgagaaaaaatcatgccgactggtaggttcgagactatgcgtgaatgggtttatgacgctatctctgctcaacgcaatgagctcctctctcttttctccaggtttcttcttaaccctctcgctctctctccctgagccttgcttataaatgcatgtgtgttgtgattggtctcaagtcatgggtaatggttttggttgttatctttattagatatgtagcccagggaaaggggatattgcagtcccaccagctgattgatgagttccttaagactgtgaaagttgatggaacattagaagatcttaacaaaagtccattcatgaaagttctgcagtctgcagaggaagccatagttttgcctccatttgttgctttggctatacgtcccagacctggtgttagggaatatgtccgtgtgaatgtgtatgagctgagcgtagatcatttaactgtttctgaatatcttcggtttaaggaagagctcgttaatggccatgccaatggagattatctccttgaacttgattttgaacctttcaatgcaacattgcctcgcccaactcgttcatcatccattgggaatggggttcagttcctcaatcgtcacctctcttcaattatgttccgtaacaaagaaagcatggagcctttgcttgagtttctccgcactcacaaacatgatggccgtcctatgatgctgaatgatcgaatacagaatatccccatacttcagggagctttggcaagagcagaggagttcctttctaaacttcctctggcaacaccatactctgaattcgaatttgaactacaagggatgggatttgaaaggggatggggtgacacagcacagaaggtttcagaaatggtgcatcttcttctggacatactccaggcacctgatccttctgtcttggagacgtttctaggaaggattcctatggtgttcaatgttgtgattttgtctccgcatggttactttggccaagccaatgtcttgggtctgcctgatactggtggacaggttgtctacattcttgatcaagtacgtgcattggaaaatgagatgctccttaggatacagaagcaaggactggaagttattccaaagattctcattgtaacaagactgctacccgaagcaaagggaacaacgtgcaaccagaggttagaaagagttagtggtacagaacacgcacacattctgcgaataccatttaggactgaaaagggaattcttcgcaagtggatctcaaggtttgatgtctggccatacctggagacttttgcagaggatgcatcaaatgaaatttctgcggagttgcagggtgtaccaaatctcatcattggcaactacagtgatggaaatctcgttgcttctttgttagctagtaagctaggtgtgatacagtgtaatattgctcatgctttagagaaaaccaagtaccccgagtctgacatttactggagaaaccatgaagataagtatcacttttcaagtcagttcactgcagatctaattgccatgaataatgccgatttcatcatcaccagcacataccaagagattgcgggaagcaagaacaatgttgggcaatacgagagccacacagctttcactatgcctggtctttaccgagttgttcatggaattgatgtctttgatcctaagtttaatatggtctctccaggagctgatatgaccatatactttccatattccgacaaggaaagaagactcactgcccttcatgagtcaattgaagaactcctctttagtgccgaacagaatgatgagcatgttggtttactgagcgaccaatcgaagccaatcatcttctctatggcaagacttgacagggtgaaaaacttgactgggctagttgaatgctatgccaagaatagcaagcttagagagcttgcaaatcttgttatagtcggtggctacatcgatgagaatcagtccagggatagagaggaaatggctgagatacaaaagatgcacagcctgattgagcagtatgatttacacggtgagtttaggtggatagctgctcaaatgaaccgtgctcgaaatggtgagctttaccgttatatcgcagacacaaaaggtgtttttgttcagcctgctttctatgaagcatttgggcttacggttgtggaatcaatgacttgtgcactcccaacgtttgctacctgtcatggtggacccgcagagattatcgaaaacggagtttctgggttccacattgacccatatcatccagaccaggttgcagctaccttggtcagcttctttgagacctgtaacaccaatccaaatcattgggttaaaatctctgaaggagggctcaagcgaatctatgaaaggtacacatggaagaagtactcagagagactgcttaccctggctggagtctatgcattctggaaacatgtgtctaagctcgaaaggagagaaacacgacgttacctagagatgttttactcattgaaatttcgtgatttggccaattcaatcccgctggcaacagatgagaactga

SEQ ID NO: 960 - protein, 797 aa, Arabidopsis thaliana
MCVVIGLKSWVMVLVVIFIRYVAQGKGILQSHQLIDEFLKTVKVDGTLEDLNKSPFMKVLQSAEEAIVLPPFVALAIRPRPGVREYVRVNVYELSVDHLTVSEYLRFKEELVNGHANGDYLLELDFEPFNATLPRPTRSSSIGNGVQFLNRHLSSIMFRNKESMEPLLEFLRTHKHDGRPMMLNDRIQNIPILQGALARAEEFLSKLPLATPYSEFEFELQGMGFERGWGDTAQKVSEMVHLLLDILQAPDPSVLETFLGRIPMVFNVVILSPHGYFGQANVLGLPDTGGQVVYILDQVRALENEMLLRIQKQGLEVIPKILIVTRLLPEAKGTTCNQRLERVSGTEHAHILRIPFRTEKGILRKWISRFDVWPYLETFAEDASNEISAELQGVPNLIIGNYSDGNLVASLLASKLGVIQCNIAHALEKTKYPESDIYWRNHEDKYHFSSQFTADLIAMNNADFIITSTYQEIAGSKNNVGQYESHTAFTMPGLYRVVHGIDVFDPKFNMVSPGADMTIYFPYSDKERRLTALHESIEELLFSAEQNDEHVGLLSDQSKPIIFSMARLDRVKNLTGLVECYAKNSKLRELANLVIVGGYIDENQSRDREEMAEIQKMHSLIEQYDLHGEFRWIAAQMNRARNGELYRYIADTKGVFVQPAFYEAFGLTVVESMTCALPTFATCHGGPAEIIENGVSGFHIDPYHPDQVAATLVSFFETCNTNPNHWVKISEGGLKRIYERYTWKKYSERLLTLAGVYAFWKHVSKLERRETRRYLEMFYSLKFRDLANSIPLATDEN

SEQ ID NO: 961 - DNA, 1293 bp, Arabidopsis thaliana
  CDS (1)..(1293)
atgaagaagcgcttaaccacttccacttgttcttcttctccatcttcctctgtttcttcttctactactacttcctctcctattcagtcggaggctccaaggcctaaacgagccaaaagggctaagaaatcttctccttctggtgataaatctcataacccgacaagccctgcttctacccgacgcagctctatctacagaggagtcactagacatagatggactgggagattcgaggctcatctttgggacaaaagctcttggaattcgattcagaacaagaaaggcaaacaagtttatctgggagcatatgacagtgaagaagcagcagcacatacgtacgatctggctgctctcaagtactggggacccgacaccatcttgaattttccggcagagacgtacacaaaggaattggaagaaatgcagagagtgacaaaggaagaatatttggcttctctccgccgccagagcagtggtttctccagaggcgtctctaaatatcgcggcgtcgctaggcatcaccacaacggaagatgggaggctcggatcggaagagtgtttgggaacaagtacttgtacctcggcacctataatacgcaggaggaagctgctgcagcatatgacatggctgcgattgagtatcgaggcgcaaacgcggttactaatttcgacattagtaattacattgaccggttaaagaagaaaggtgttttcccgttccctgtgaaccaagctaaccatcaagagggtattcttgttgaagccaaacaagaagttgaaacgagagaagcgaaggaagagcctagagaagaagtgaaacaacagtacgtggaagaaccaccgcaagaagaagaagagaaggaagaagagaaagcagagcaacaagaagcagagattgtaggatattcagaagaagcagcagtggtcaattgctgcatagactcttcaaccataatggaaatggatcgttgtggggacaacaatgagctggcttggaacttctgtatgatggatacagggttttctccgtttttgactgatcagaatctcgcgaatgagaatcccatagagtatccggagctattcaatgagttagcatttgaggacaacatcgacttcatgttcgatgatgggaagcacgagtgcttgaacttggaaaatctggattgttgcgtggtgggaagagagagcccaccctcttcttcttcaccattgtcttgcttatctactgactctgcttcatcaacaacaacaacaacaacctcggtttcttgtaactatttggtctga

SEQ ID NO: 962 - protein, 430 aa, Arabidopsis thaliana
MKKRLTTSTCSSSPSSSVSSSTTTSSPIQSEAPRPKRAKRAKKSSPSGDKSHNPTSPASTRRSSIYRGVTRHRWTGRFEAHLWDKSSWNSIQNKKGKQVYLGAYDSEEAAAHTYDLAALKYWGPDTILNFPAETYTKELEEMQRVTKEEYLASLRRQSSGFSRGVSKYRGVARHHHNGRWEARIGRVFGNKYLYLGTYNTQEEAAAAYDMAAIEYRGANAVTNFDISNYIDRLKKKGVFPFPVNQANHQEGILVEAKQEVETREAKEEPREEVKQQYVEEPPQEEEEKEEEKAEQQEAEIVGYSEEAAVVNCCIDSSTIMEMDRCGDNNELAWNFCMMDTGFSPFLTDQNLANENPIEYPELFNELAFEDNIDFMFDDGKHECLNLENLDCCVVGRESPPSSSSPLSCLSTDSASSTTTTTTSVSCNYLV

SEQ ID NO: 963 - DNA, 726 bp, Brassica napus
  CDS (1)..(726)
atggcttcgtcccatcagagccacaccaccagcttcaacccccggaggatcaagactaaggcgaagccaccacatcagatcagtcacatgagaccgtctccggcggctcagccggtacttaaatgtccgaggtgtgattccgtcaacaccaagttctgttactacaacaactacagcttatctcagccacgccactactgcaaaaactgtcgccgttactggacacgtggcggaaccctacgtaacgtccccatcggtggtccaaccagaaacaagaacaagccttctagcctccaagtcatctcttctccacctccgattgtagcgccattgtcgtctcacgagctcgttgatgggtttcgtatgaacagagcgatgatagacccttcttcgacggcgtttccaggtggattctccggctacatgttttcgttggatcctaactacaatcttgcatcttcttctatcgagtctttgagttctttaaaccaagatttgcaccagaagcttcagcaacagagactcttcacttccatgtttcaacaagattctccaccggttatgtttcataacgttgagctacttcctccttcgacagcgacaacggagtgggctttcgatagatcagccattggggaagcaacaagtggcagtaatgaaaacaatggtgaacgtgagggtaatttaggaagttggtactataatcctaataattctatgccctag

SEQ ID NO: 964 - protein, 241 aa, Brassica napus
MASSHQSHTTSFNPRRIKTKAKPPHQISHMRPSPAAQPVLKCPRCDSVNTKFCYYNNYSLSQPRHYCKNCRRYWTRGGTLRNVPIGGPTRNKNKPSSLQVISSPPPIVAPLSSHELVDGFRMNRAMIDPSSTAFPGGFSGYMFSLDPNYNLASSSIESLSSLNQDLHQKLQQQRLFTSMFQQDSPPVMFHNVELLPPSTATTEWAFDRSAIGEATSGSNENNGEREGNLGSWYYNPNNSMP

SEQ ID NO: 965 - DNA, 2412 bp, Brassica napus
  CDS (1)..(2412)
atggaaatgcccggcgctagaagatccaattacactctgcttagtcaattccccgacgaccaggtctccgtctccgtcaccggagctcctccgcctcactatgactcctccttgtcgagcgccagcaacaacaacagcggcaacaacggaaaatccaaatccggattcgattgggatcatcatcctagcggcggcggtggtgatcacaggccgccgaatcgggctgggaatatgtactcttcgtcgcttggtttgcagaggcaatcgagcgggagcagcttcggcgagagctcgctgtccggggattactatgtgcctacgctctccgcggcgggtaacgagatcgaaatggttgggtttcctcaagacgtcgggttaggtgattcgaggatgcagatggggatggattcggctggaggttcgtcgtctgggaagagctgggcgcagcagacggaggagagttatcagctgcagcttgcgttggcgttgaggctttcctcggaggctacttgcgctgatgatccgaactttctagatcctgtaccggacgagtctgctttgcggacttcgccgagttctgctgaaaccgtttctcatcgcttctgggtaaatggatgcttatcgtactatgataaagttcctgacgggttttatatgactgatggtctggatccatatatttggaccttatgcattgatctaaatgaaagtggccgcatcccttcaattgaatcgttgagagctattgattctggtgttgactcttcgctggaagccatcttagtcgatcggcgtgttgatccagccttcaaggaacttcacaatagagtccacgacatctcttgtagctgcataaccacaaaagaggttgtggaccagctggcaaaactaatctgcaatcgtatgggaggttcagttatcatgggggaagatgagttggttcccatgtggaaggagtgcattaacggtctaaaagagtgctttaaagttgtggttcccataggtagcctctctgtaggactctgcagacaccgagctttactcttcaaagtactggctgacataatagatttaccctgtcgaatcgcaaaggggtgcaaatattgtaatagagacgatgctgcgtcgtgccttgtcaggtttgggcttgatagggagtatcttgttgatttagttggaaaaccaggccacttgtgggagcctgattccttgctaaatggtccctcgactatctcaatttcatcacctttgcggtttccccgacccaggccagttgaacctgcggtcgattttagggaactagccaagcagtacttcaccgacagtgaatctcttaatcttgttttcgatcctgcatcagatgatataggattctcaatgtttcataggggtggagaaaatgatggttcggcagaaaatgggggtggatctgtgcctcccggtgctaatatgcctccacagaacataatgcgtgcctcaaatcaagtccaagatgcagtacctataaatgccccaccaatcaatcagccggttgtgaacagagcaaacagggatcttggactcgatggtgatgatatggacatcccatggtgtgatcttaatataaaagagaagattggagcaggttcctttggcactgttcatcgtgctgagtggcatggctcggatgttgctgtgaaaattctcatggagcaagacttccatgctgagcgtgtcaatgagttcttgagagaggttgcaataatgaaacgccttcgccacccgaatattgttctcttcatgggagctgtcactcaacctccaaatttgtcaatagtgacagaatatttgtcaagaggtagtttattcagacttttgcataaaagtggagcaagagagcaactggatgagagacgccgcttgagtatggcatatgatgtggctaaaggaatgaattatctccataatcgcaatcctccgattgtacatagagatctaaaatctccaaacttgctggtcgacaaaaaatacaccgtcaaggtttgtgattttggtctctcgcggttaaaggccagcacgttcctttcatcaaagtcggcagctggaactcccgagtggatggcaccagaggtcctgcgggatgagcaatctaatgagaagtcagacgtgtacagctttggggtcatcttgtgggagcttgctacattgcagcaaccatggggtaatttgaatcctgctcaggttgtagctgcggttggtttcaagaataaacggcttgagatccctcggaacctgaaccctcaagttgcagcaataatcgagggttgttggacaaatgagccgtggaagcgtccatcatttgcaacaattatggacttgctaagaccattgatcaaatcagcggttcctccacccaaccgcttggatctgtga

SEQ ID NO: 966 - protein, 803 aa, Brassica napus
MEMPGARRSNYTLLSQFPDDQVSVSVTGAPPPHYDSSLSSASNNNSGNNGKSKSGFDWDHHPSGGGGDHRPPNRAGNMYSSSLGLQRQSSGSSFGESSLSGDYYVPTLSAAGNEIEMVGFPQDVGLGDSRMQMGMDSAGGSSSGKSWAQQTEESYQLQLALALRLSSEATCADDPNFLDPVPDESALRTSPSSAETVSHRFWVNGCLSYYDKVPDGFYMTDGLDPYIWTLCIDLNESGRIPSIESLRAIDSGVDSSLEAILVDRRVDPAFKELHNRVHDISCSCITTKEVVDQLAKLICNRMGGSVIMGEDELVPMWKECINGLKECFKVVVPIGSLSVGLCRHRALLFKVLADIIDLPCRIAKGCKYCNRDDAASCLVRFGLDREYLVDLVGKPGHLWEPDSLLNGPSTISISSPLRFPRPRPVEPAVDFRELAKQYFTDSESLNLVFDPASDDIGFSMFHRGGENDGSAENGGGSVPPGANMPPQNIMRASNQVQDAVPINAPPINQPVVNRANRDLGLDGDDMDIPWCDLNIKEKIGAGSFGTVHRAEWHGSDVAVKILMEQDFHAERVNEFLREVAIMKRLRHPNIVLFMGAVTQPPNLSIVTEYLSRGSLFRLLHKSGAREQLDERRRLSMAYDVAKGMNYLHNRNPPIVHRDLKSPNLLVDKKYTVKVCDFGLSRLKASTFLSSKSAAGTPEWMAPEVLRDEQSNEKSDVYSFGVILWELATLQQPWGNLNPAQVVAAVGFKNKRLEIPRNLNPQVAAIIEGCWTNEPWKRPSFATIMDLLRPLIKSAVPPPNRLDL

SEQ ID NO: 967 - DNA, 2412 bp, Brassica napus
  CDS (1)..(2412)
atggaaatgccgggggctcgaaggtcaaattacacacttctaagccagttcccagatgaccaggtgagcgtgtcagttacaggagcgccaccgccacactatgatagttctctttctagtgcaagcaacaataactctggtaataacgggaaaagcaagagtggatttgattgggatcatcacccatctggtggagggggagatcatcgtccccctaacagagctggtaacatgtactccagttcgctcggattacagcgccaaagttccggtagctcattcggggaatcttccctcagtggagactactatgttccaactcttagtgctgcgggaaacgaaatcgaaatggtcggatttccacaagacgttgggcttggcgattctagaatgcaaatgggaatggattctgccgggggctcctcatccggaaagtcttgggctcagcaaacagaagagagctaccagctacaacttgcattggcattgagactctctagtgaggccacgtgtgctgatgaccctaacttcttggatcctgtaccagacgaatcggctttgaggacctctccctctagtgctgagacagtttctcacaggttctgggttaatggctgtctctcatattacgacaaggtgccagatggattttacatgactgacgggctggatccctatatttggactttgtgtatagatttgaatgaatcaggacggatcccttctattgagtctcttagagctatagatagtggcgtggatagctctttggaagctatcttagtagatcgtcgggtcgatcctgctttcaaagagcttcataatcgcgtccatgacatatcttgttcatgtatcactaccaaagaagtggtagatcaattggcaaagttaatttgcaatcgtatgggaggctccgttattatgggtgaggacgagcttgtcccaatgtggaaagagtgcataaatgggctcaaagaatgttttaaagttgtggttcctattggtagtctgtccgtgggattatgtcgtcatagagccctcctgtttaaagttttggctgatatcattgacctgccctgccgcattgctaaaggatgcaaatactgtaatcgtgatgacgcagcctcatgccttgttcgattcggtttggatagggagtatttggttgatctcgtcggtaaaccaggacacttatgggaaccggattcattgcttaatgggccttccactatatcaatctcgtcaccattaaggtttcccagacccagaccagtcgaaccggctgttgacttcagggagttggcaaagcagtattttaccgacagtgaaagtctgaatcttgtgttcgatcccgcctctgacgatattggttttagcatgttccataggggaggtgaaaacgatggctcagccgagaatggtggcggttctgtccctccaggtgcaaacatgcctccacaaaacattatgagggcttctaatcaagttcaggatgctgtgcctataaacgcgcctccaattaaccaacccgtggttaatagagccaaccgagatctgggactggacggggatgacatggacataccatggtgcgatcttaacattaaggaaaagataggtgcaggttcgtttggcacagtacacagagcagagtggcacggttctgatgtggcagttaagattctaatggagcaggattttcacgcagaaagagtcaatgagtttttgcgtgaggtggcaatcatgaagagactaaggcatcctaacattgttctctttatgggtgctgtcacccaaccgcctaatctttctattgttaccgagtacctatcaaggggctctctgttccgactactgcataagtctggcgctcgtgaacaattggacgagcgcagaaggctctccatggcttatgatgtggctaagggtatgaactatttgcacaatagaaatcctcccattgtgcatagagaccttaagtctcctaaccttttagttgacaagaaatatacggttaaggtgtgcgacttcggtttgtccagacttaaggcatccaccttcctctcgagtaaaagcgcggccggaactcccgaatggatggctcctgaggttcttagggacgaacaatcaaatgagaaatccgatgtatacagctttggggttattctgtgggaacttgcgacactccagcaaccttggggcaatcttaatcctgcacaggttgtggcagccgtgggattcaagaacaagcgcttggaaatcccaaggaacttgaacccacaggtggctgcaattatcgagggctgctggactaacgaaccatggaaaaggccatcatttgccacaatcatggatcttttgcggcctcttattaagtccgccgtcccacctcccaaccgcctcgatctttaa

SEQ ID NO: 968 - protein, 803 aa, Brassica napus; identical to SEQ ID NO: 966

SEQ ID NO: 969 - DNA, 2421 bp, Brassica napus
  CDS (1)..(2421)
atggcgaaagagattcaatctcaatctcctccgtcgcctacgaccaccggaatcacgttttcttcttcttcctcttcgccgtctctgtcaatgatgctatcctccaccaacgcgttctcgttactctcgaaagggtggagggaggtgcgggactcagcagacgcggatttgcagctgatgcggaaacgagcgaactccgttaagaatctagcgtcgacgttcgaccgcgagatcgagaatttcctcaacaactcggcgatgtctgcgtttcccgtcgtgtcgtcgtctccgtcggcgtttggcaatgagattgggatcatgaagaagcttgagccgaagatatcggagttccgcagggtttattcggctccggagatcagccgtaaggtgatggagaggtgggggccagcgaaggcgaagctggggatcgatttgtcggcgattaagaaggcgattgtgtctgagatggatctggatgagcgggaaggggttttggagatgaggagacggcgggatagggataggtttagggagttttacgcggagggagagggagaaggtagttttggagattggaagccgattaggtctttgaagagtaggtttaaagagtttgagaaacgaagctccttagagttattgattggattcaagaacagtgagcttgtggagaagctcaaagccagctttcaatcactttataaagaaactgatgaggccaaggatgttccaccactggatgtacctgaacttttggcatctttggttaggcagtcagaaccgttccttgatcagattggtgtaagaaaggatttgtgcgaccgagtagtagaaaacctttataaatgcaagagccaacacctctggcgcctgccctctgcacaaacatctgatttagttgaaaatgataaccatgttgatgatttggatacgaggatagccagtgttcttcagagcacaggacaccattacgatggtggcttttggactgattttctgaagcctgagacgccagaaagcaaaaggcacgtggcaatagttacaacagctagtctcccgtggatgaccggaacagctgtaaatcccctgttccgagctgcctatttagcaaaatctgcaaaacagagtgtcacactcgtggttccttggctctgcgaatctgatcaagaactggtttatccaaacaatctcaccttcagttcacctgaagaacaagagagttatatacgtacatggttggaggaaaggattggtttcaaggctgattttaaaatctcgttttaccccggaaagttttcaaaagaaaggcgcagcatatttcctgctggtgacacttctcaattcataccgtcaaaagatgcagacattgctattcttgaagagcctgaacatctcaactggtatcaccacggcaagcgttggactgataaattcaaccatgttgttggaattgtccacacaaactacttagagtacatcaagagggagaagcatggtgctatccaagcattttttgtgaaccatgtaaacaattgggtcacacgagcatattgcgacaaggttcttcgcctctctggagcaacacaagatctgccaaaatctgttatatgcaatgtccatggtgtcaatcccaagttccttatgattggggaaaaaattgctgaggagagttcccgtggggaacaagctttctcaaaaggcgcatacttcttaggaaaaatggtgtgggctaaaggctacagagaactaatagatctgatggctaaacacaaaagcgacctcgggagcttcaatttagatgtgtacggaaacggtgaagatgcagtcgaagtccaacgtgcagcacagaaactcgatttgaatctcaatttcctcaaaggaagggaccatgcggacgatgctcttcacaagtacaaagtgttcataaacccgagcatcagcgatgttctatgcacagcaaccgcggaagcactagccatggggaagttcgtggtgtgtgcagaccatccttcaaacgagttcttcagatcattcccaaactgtctaacctacaaaacatccgaagactttgtgaacaaagtgaaagaagcaatgtcgaaagagccgttaccgctcacccctgagcagatgtacaatctttcttgggaagcagcgacacagagattcatggagtattcggatctcgataagatcttaaacgatgaagacggaggaaaaaggatgagaaaatcaagatcggttccgagctttgacgaggtgatcgatggaggattggcgttcacacactatgttctcacagggaatgatttcttgagactatgcagtggagcaacaccaaaaacaaaagactatgataagcaacattgcaaggatctgaaacttgttccacctcaagctcacaagccagtctacggctggtag

SEQ ID NO: 970 - protein, 806 aa, Brassica napus
MAKEIQSQSPPSPTTTGITFSSSSSSPSLSMMLSSTNAFSLLSKGWREVRDSADADLQLMRKRANSVKNLASTFDREIENFLNNSAMSAFPVVSSSPSAFGNEIGIMKKLEPKISEFRRVYSAPEISRKVMERWGPAKAKLGIDLSAIKKAIVSEMDLDEREGVLEMRRRRDRDRFREFYAEGEGEGSFGDWKPIRSLKSRFKEFEKRSSLELLIGFKNSELVEKLKASFQSLYKETDEAKDVPPLDVPELLASLVRQSEPFLDQIGVRKDLCDRVVENLYKCKSQHLWRLPSAQTSDLVENDNHVDDLDTRIASVLQSTGHHYDGGFWTDFLKPETPESKRHVAIVTTASLPWMTGTAVNPLFRAAYLAKSAKQSVTLVVPWLCESDQELVYPNNLTFSSPEEQESYIRTWLEERIGFKADFKISFYPGKFSKERRSIFPAGDTSQFIPSKDADIAILEEPEHLNWYHHGKRWTDKFNHVVGIVHTNYLEYIKREKHGAIQAFFVNHVNNWVTRAYCDKVLRLSGATQDLPKSVICNVHGVNPKFLMIGEKIAEESSRGEQAFSKGAYFLGKMVWAKGYRELIDLMAKHKSDLGSFNLDVYGNGEDAVEVQRAAQKLDLNLNFLKGRDHADDALHKYKVFINPSISDVLCTATAEALAMGKFVVCADHPSNEFFRSFPNCLTYKTSEDFVNKVKEAMSKEPLPLTPEQMYNLSWEAATQRFMEYSDLDKILNDEDGGKRMRKSRSVPSFDEVIDGGLAFTHYVLTGNDFLRLCSGATPKTKDYDKQHCKDLKLVPPQAHKPVYGW

SEQ ID NO: 971 - DNA, 2421 bp, Brassica napus
  CDS (1)..(2421)
atggcaaaagaaattcagtcacaatcgccacctagccctaccacaacgggcattaccttctcatctagttcatcgtctccctctcttagtatgatgctttctagcactaatgcattttcccttttgagtaagggatggagagaagtgcgcgattccgcagatgcggatctacaactgatgcgaaagcgcgctaatagtgttaagaacctagcttctacgtttgacagagaaatagagaatttcctcaataactctgcaatgtccgcattcccagtagtgtcatctagtcctagtgcctttggtaacgaaattggaattatgaagaagctcgagcctaaaatctcagagtttaggcgggtgtacagtgcacctgaaattagccgcaaagtcatggaaagatgggggcctgctaaagccaagttgggtatcgacttgtcagcaatcaagaaagccattgttagtgaaatggatttggatgagagagaaggcgtcttggaaatgagacgacgtcgcgatagagaccgtttcagggaattttatgctgagggcgagggagaaggttcattcggtgactggaagcccattaggtctcttaaatcaaggtttaaagagtttgagaagagaagttctttagagcttctgatcggctttaagaattcagagctggttgagaaattgaaggcatcttttcagagcttgtataaagaaaccgatgaagctaaggacgtcccgcctctggatgtcccagaactccttgcctcgcttgtgaggcaatcagagccatttctcgatcagataggtgttcgtaaagacttatgtgatagagttgtggaaaatctctacaagtgcaagtcccagcatctatggaggcttcccagtgcccagacctctgatctagttgagaacgataatcatgttgatgaccttgatactagaatagcatcagtactacaatctacaggtcaccattatgacggagggttctggactgattttctgaagccagaaactcctgagagcaaacgccatgttgccattgttacaaccgcctctttaccatggatgacaggcacagctgttaaccccctcttcagggcagcgtatctcgctaaatctgctaagcagagtgtcaccttagttgtcccatggttgtgcgaatctgatcaggagcttgtgtaccctaacaatttgactttcagttcgccggaggaacaggagtcatacataagaacatggctcgaagagaggatcgggttcaaggctgacttcaaaatctctttttaccccggtaagtttagcaaggaacgccggtccatcttcccagctggagatacgagccaattcattccttcaaaagatgcagacattgcaatattggaagagcctgaacacctaaattggtatcaccatggaaaacgttggaccgacaagtttaaccacgttgtgggtatcgtgcatacaaactatttggagtacattaaacgtgagaaacacggtgcaattcaggcctttttcgttaaccatgttaacaattgggttaccagagcttattgcgataaggtgctccgtttgtccggggcaacacaagatctcccaaagagtgtaatctgtaacgtgcacggagttaatccaaaattcctcatgataggggagaagattgccgaagagtccagcagaggagaacaggctttctcaaagggagcgtactttcttggtaagatggtctgggctaagggctatagggaattgatcgatcttatggcaaagcataaatcggatttgggaagctttaaccttgacgtttacgggaacggtgaagatgccgttgaggtgcaacgagctgcgcaaaagttggaccttaacttaaattttcttaagggaagggaccacgctgatgacgccttgcataaatacaaggtgttcattaatccctccatttccgacgttctttgtactgctacagcagaggctcttgcaatggggaaatttgtcgtatgcgctgaccatccatctaatgaatttttcagatcatttcccaactgcctaacttataagacatcagaggatttcgtgaacaaagtcaaagaggcgatgagcaaggagccccttcctctcactccagaacaaatgtataacttgtcctgggaagccgctactcaaaggttcatggagtactccgatctggataagatattaaacgatgaggatggcggaaagcgaatgcggaagtctagatccgtgccatccttcgacgaggtgatagacggcgggctcgcttttactcactatgtactgactggtaatgatttcctgaggctgtgtagcggagccacccctaagactaaggactacgataaacaacactgtaaggacttaaagctggtacctccgcaagctcataagccagtgtatggttggtaa

SEQ ID NO: 972 - protein, 806 aa, Brassica napus; identical to SEQ ID NO: 970

SEQ ID NO: 973 - DNA, 1191 bp, Brassica napus
  CDS (1)..(1191)
atggcgtcttttgctaaagtctgtacgtacaataagcctgtaccggtattaacgacttctctctgtaaatgctcatgccgtgtatccactaagaaaaccctaaatctcccacctttctccgattactcgagcttacgtctggtccgtgatgccaaaaccgaacctttgtttctttcccgccttggtcggattcctgttaaacggcgtttcctcacggccgttactcgagctgaatcgaaccagcttggtggtgacacctcagagaatgttgaagaagaagagaagcagaagaaagcaagccagcttaagaaaagagtcatctttggtgttgccattgggttacctgttggaggtgttgtcttagctggaggatgggttttcacattagccttggcagcttctgttttcatcggttctcgtgaatatttcgagctcgttagaagcagaggcatagctaagggaatgactcctcctcctagatacgtatcacgtttttgctccgttatatgtgctcttatgcccatacttacactgtactatggtaacattgatatatgggtgacatgcgcagcgtttgttgttgcaatggctttgttagtacagagaggaaacccacgtttttctcagcttagtagtacgatgtttggcttgttttactgtggctatctcccttgtttctgggttaagcttcgttgtggtttagctgctcctgcgctcaacactggaattgcaaggacttggccaatttttcttggtggtccacctcagtggacggtgggactcgtggcaacgttgatttcattcagtggtgtgattgccacagacacatttgctttcctcggtggcaaggcttttggtaggacacctcttactagtattagtcccaagaagacatgggaagggacttttgctggacttgttggctgtatagtcattaccattctactctctaagtctctgtcttggcctcagtctctgttcagctccattgcttttgggtttattaacttctttgggtcagtctttggtgatcttactgaatcaatgatcaaacgtgatgctggcgtcaaagactctggttcacttatccctggacatggtggaatattggacagggttgatagttacattttcaccggtgcattagcatactcgttcatcaaaacatcccttagactttacggagtttga

SEQ ID NO: 974 - protein, 396 aa, Brassica napus
MASFAKVCTYNKPVPVLTTSLCKCSCRVSTKKTLNLPPFSDYSSLRLVRDAKTEPLFLSRLGRIPVKRRFLTAVTRAESNQLGGDTSENVEEEEKQKKASQLKKRVIFGVAIGLPVGGVVLAGGWVFTLALAASVFIGSREYFELVRSRGIAKGMTPPPRYVSRFCSVICALMPILTLYYGNIDIWVTCAAFVVAMALLVQRGNPRFSQLSSTMFGLFYCGYLPCFWVKLRCGLAAPALNTGIARTWPIFLGGPPQWTVGLVATLISFSGVIATDTFAFLGGKAFGRTPLTSISPKKTWEGTFAGLVGCIVITILLSKSLSWPQSLFSSIAFGFINFFGSVFGDLTESMIKRDAGVKDSGSLIPGHGGILDRVDSYIFTGALAYSFIKTSLRLYGV

SEQ ID NO: 975 - DNA, 2418 bp, Brassica napus
  CDS (1)..(2418)
atggtgaacggggtgttaacgcgcgtccacagccaacgtgagcgtttgaacgaaacgctcgctgctcaaagaaacgaagtccttgccttactttccagggttgaaggcaaaggtaaaggcatcttgcaacaaaaccagatcattgctgaattcgaggctttgcctgaagaaacccagaagaagattgaaggtggtgctttcttcgaccttctcaaaaccactcaggaagcaatagtgttgccaccatgggttgctcttgctgtgaggccaaggcctggtgtttgggagtacataagagtcaatctccatgctcttgttgttgaggagcttacacctgctgagtttcttcatttcaaggaagagcttgttgatggagttaagaacggtgatttcacgcttgagcttgactttgagccgtttaatgcctctgtccctcgcccaacgctccccaagtacattggagatggtgttgagtttctcaaccgtcacctctcggctaagctcttccatgacaaggagagtttgcttcctttgctcaagttccttcgactacacagctaccagggaaagaccctgatgctgaacgagagagttcaaaacctcaacaatctgcaacacatcttgaggaaggcagaggagtatctggcaggtctttcacctgaaacgccttatgaagattttgaggccaagtttgaggagattggtcttgagaggggatggggaaacaatgccgagcgtgtccttgacatgatccgtcttcttttggacctcctcgaggcccctgacccttgcactctagagaactttcttgggagagtccctatggtgttcaacgttgtcatcctctctccacatggttactttgctcaggacaatgttcttggttaccctgacactggtggtcaggttgtttacattctggatcaagtccgtgccatggagacagagatgctccaacgtattcagcagcaaggactcaacattactccaagaattctcattctcactagactgctccctgatgcagtaggaaccacatgtggtgagcgtcttgagagagttgatggatctgagtactgtgacatcctccgtgtgcccttcagaacagagaagggtatcgttcgcaaatggatctcaagattcgaagtctggccatatctagagacttacaccgaggatgctgccgttgagcttgctaaagagttgaagggcaagcctgaccttatcattggtaactacagtgatggcaacctcgttgcctctttactggcacacaaacttggtgtcactcagtgtaccattgctcacgccctggagaagacaaagtaccctgactcggatatatactggaagaagcttgacgataagtaccatttctcatgccagttcactgcagatctatttgcaatgaaccatactgatttcatcatcacaagtactctccaagaaattgctggaagcaaggacacagttgggcagtatgagagccacacggcctttactcttcctggactgtaccgagttgttcatggcattgatgtgtttgatcccaagttcaacattgtctctcctggtgctgacatgagcatctacttcccatacactgaggagaagcgtagattgactaagttccacccagagattgaggagctcctctacagcaatgttgaaaacgaagagcacttatgtgtgctcaaggacaagaagaagccaatcctcttcacaatggctaggctcgaccgtgtcaagaacttgtcaggtcttgttgagtggtacgggaagaacaaacgcctgcgtgagcttgttaacttggtggttgttggaggagacaggaggaaagagtcaaaggacaacgaagagaaggccgagatgaagaaaatgtatgacctcattgaggaatacaagctcaacggccagttccgttggatctcctcccagatgaacagggttaggaacggcgagctctacaggtacatctgtgacaccaagggtgcttttgtgcaaccagcattgtatgaagcctttggattgactgttgtggaggctatgacctgtgggttaccaacattcgccacttgcaaaggtggtccagctgagatcattgtccacggcaaatcaggtttccacattgacccttaccatggtgatcaggctgctgatactcttgctgatttcttcgccaagtgtaaggaagatccatctcactgggaccagatctcaaagggagggcttcagaggattgaggagaaatacacgtggcagatttactcacagaggctcttgacattgactggtgtgtatggattctggaagcatgtctcgaaccttgaccgtcttgagagccgtcgttaccttgagatgttctatgcattgaagtatcgcccactggctcaggctgttcctcttgctcaagagtaa

SEQ ID NO: 976 - protein, 805 aa, Brassica napus
MVNGVLTRVHSQRERLNETLAAQRNEVLALLSRVEGKGKGILQQNQIIAEFEALPEETQKKIEGGAFFDLLKTTQEAIVLPPWVALAVRPRPGVWEYIRVNLHALVVEELTPAEFLHFKEELVDGVKNGDFTLELDFEPFNASVPRPTLPKYIGDGVEFLNRHLSAKLFHDKESLLPLLKFLRLHSYQGKTLMLNERVQNLNNLQHILRKAEEYLAGLSPETPYEDFEAKFEEIGLERGWGNNAERVLDMIRLLLDLLEAPDPCTLENFLGRVPMVFNVVILSPHGYFAQDNVLGYPDTGGQVVYILDQVRAMETEMLQRIQQQGLNITPRILILTRLLPDAVGTTCGERLERVDGSEYCDILRVPFRTEKGIVRKWISRFEVWPYLETYTEDAAVELAKELKGKPDLIIGNYSDGNLVASLLAHKLGVTQCTIAHALEKTKYPDSDIYWKKLDDKYHFSCQFTADLFAMNHTDFIITSTLQEIAGSKDTVGQYESHTAFTLPGLYRVVHGIDVFDPKFNIVSPGADMSIYFPYTEEKRRLTKFHPEIEELLYSNVENEEHLCVLKDKKKPILFTMARLDRVKNLSGLVEWYGKNKRLRELVNLVVVGGDRRKESKDNEEKAEMKKMYDLIEEYKLNGQFRWISSQMNRVRNGELYRYICDTKGAFVQPALYEAFGLTVVEAMTCGLPTFATCKGGPAEIIVHGKSGFHIDPYHGDQAADTLADFFAKCKEDPSHWDQISKGGLQRIEEKYTWQIYSQRLLTLTGVYGFWKHVSNLDRLESRRYLEMFYALKYRPLAQAVPLAQE

SEQ ID NO: 977 - DNA, 1248 bp, Brassica napus
  CDS (1)..(1248)
atgaagagacccttaaccacttctccttctacctcctcttctacttcttcttcggcttgtatacttccgactcaaccagagactccaaggcccaaacgagccaaaagggctaagaaatcttctattcctactgatgttaaaccacagaatcccaccagtcctgcctccaccagacgcagctctatctacagaggagtcactagacatagatggacagggagatacgaggctcatctatgggacaaaagctcgtggaattcgattcagaacaagaaaggcaaacaagtttatctgggagcatatgacagcgaggaagcagcagcgcatacgtacgatctagctgctctcaagtactggggtcccgacaccatcttgaactttccggctgagacgtacacaaaggagttggaggagatgcagagatgtacaaaggaagagtatttggcttctctccgccgccagagcagtggtttctctagaggcgtctctaaatatcgcggcgtcgccaggcatcaccataacggaagatgggaagctaggattggaagggtgtttggaaacaagtacttgtacctcggcacttataatacgcaggaggaagctgcagctgcatatgacatggcggctatagagtacagaggcgcaaacgcagtgaccaacttcgacattagtaactacatcgaccggttaaagaaaaaaggtgtcttcccattccctgtgagccaagccaatcatcaagaagctgttcttgctgaagccaaacaagaagtggaagctaaagaagagcctacagaagaagtgaagcagtgtgtcgaaaaagaagaaccgcaagaagctaaagaagagaagactgagaaaaaacaacaacaacaagaagtggaggaggcggtggtcacttgctgcattgattcttcggagagcaatgagctggcttgggacttctgtatgatggattcagggtttgctccgtttttgacggattcaaatctctcgagtgagaatcccattgagtatcctgagcttttcaatgagatggggtttgaggataacattgacttcatgttcgaggaagggaagcaagactgcttgagcttggagaatctggattgttgcgatggtgttgttgtggtgggaagagagagcccaacttcattgtcgtcttcaccgttgtcttgcttgtctactgactctgcttcatcaacaacaacaacaacaataacctctgtttcttgtaactattctgtctga

SEQ ID NO: 978 - protein, 415 aa, Brassica napus
MKRPLTTSPSTSSSTSSSACILPTQPETPRPKRAKRAKKSSIPTDVKPQNPTSPASTRRSSIYRGVTRHRWTGRYEAHLWDKSSWNSIQNKKGKQVYLGAYDSEEAAAHTYDLAALKYWGPDTILNFPAETYTKELEEMQRCTKEEYLASLRRQSSGFSRGVSKYRGVARHHHNGRWEARIGRVFGNKYLYLGTYNTQEEAAAAYDMAAIEYRGANAVTNFDISNYIDRLKKKGVFPFPVSQANHQEAVLAEAKQEVEAKEEPTEEVKQCVEKEEPQEAKEEKTEKKQQQQEVEEAVVTCCIDSSESNELAWDFCMMDSGFAPFLTDSNLSSENPIEYPELFNEMGFEDNIDFMFEEGKQDCLSLENLDCCDGVVVVGRESPTSLSSSPLSCLSTDSASSTTTTTITSVSCNYSV

SEQ ID NO: 979 - DNA, 1248 bp, Brassica napus
  CDS (1)..(1248)
atgaaaaggccgctaaccacttcaccaagtacttcctctagcacgagcagttccgcatgtattcttccaacccaacctgaaaccccaagacctaaaagagctaagagagccaagaagtcctcaatccctacggacgtaaagccacaaaatcccacttctcctgctagtacccgtagaagttcaatctatcgaggtgtgaccaggcatcggtggacaggtcgctatgaagcacatttgtgggacaagagttcttggaactcaattcagaataagaaagggaaacaggtgtatcttggggcgtacgattcagaagaggctgccgctcatacttatgacttagcagccttgaagtactggggacccgataccattttgaatttccctgctgaaacttacacaaaggagttagaggaaatgcagcgttgcacaaaggaagagtaccttgcaagtctgaggagacaatcttcaggcttctcacgcggtgttagcaaatatcgtggtgttgctcgacaccatcacaacggcaggtgggaagcaaggataggcagagtttttggcaacaagtatttgtatcttggaacatacaatacacaagaggaagcagctgcagcctacgacatggctgcaatcgagtatcgcggagccaacgccgtcactaattttgatatcagtaactacattgatagacttaagaagaaaggagtgttcccatttcctgttagccaggcaaatcatcaagaggcagtcttggcggaggctaagcaagaggttgaggcaaaggaggaaccaacagaagaggtgaaacaatgcgttgagaaagaggaacctcaggaagctaaggaagagaaaactgagaagaaacaacagcaacaggaagtggaagaggctgttgtgacgtgctgtatagattcatcggagagcaacgaattggcctgggatttctgcatgatggattccggatttgctccctttctcaccgattctaatctctcttccgaaaacccgattgaatacccagagcttttcaacgaaatgggtttcgaggataacatagactttatgtttgaagagggaaagcaggactgtctgtctctagaaaatctggattgttgcgatggggtcgtggttgtcggtagggaaagtcccacttccctctcgtctagcccactctcatgtttgtctactgacagtgcgtcctctacaaccacaaccacaattacttcggtatcctgtaattattctgtttaa

SEQ ID NO: 980 - protein, 415 aa, Brassica napus; identical to SEQ ID NO: 978

SEQ ID NO: 981 - DNA, 1296 bp, Escherichia coli
  CDS (1)..(1296): transl_table=11
atggttagtttagagaagaacgatcacttaatgttggcgcgccagctgccattgaaatctgttgccctgatactggcgggaggacgtggtacccgcctgaaggatttaaccaataagcgagcaaaaccggccgtacacttcggcggtaagttccgcattatcgactttgcgctgtctaactgcatcaactccgggatccgtcgtatgggcgtgatcacccagtaccagtcccacactctggtgcagcacattcagcgcggctggtcattcttcaatgaagaaatgaacgagtttgtcgatctgctgccagcacagcagagaatgaaaggggaaaactggtatcgcggcaccgcagatgcggtcacccaaaacctcgacattatccgccgttataaagcggaatacgtggtgatcctggcgggcgaccatatctacaagcaagactactcgcgtatgcttatcgatcacgtcgaaaaaggcgcacgttgcaccgttgcttgtatgccagtaccgattgaagaagcctccgcatttggcgttatggcggttgatgagaacgataaaattatcgaattcgttgaaaaacctgctaacccgccgtcaatgccgaacgatccgagcaaatctctggcgagtatgggtatctacgtctttgacgccgactatctgtatgaactgctggaagaagacgatcgcgatgagaactccagccacgactttggcaaagatttgattcccaagatcaccgaagccggtctggcctatgcgcacccgttcccgctctcttgcgtacaatccgacccggatgccgagccgtactggcgcgatgtgggtacgctggaagcttactggaaagcgaacctcgatctggcctctgtggtggacaaactggatatgtacgatcgcaattggccaattcgcacctacaatgaatcattaccgccagcgaaattcgtgcaggatcgctccggtagccacgggatgacccttaactcactggtttccggcggttgtgtgatctccggttcggtggtggtgcagtccgttctgttctcgcgcgttcgcgtgaattcattctgcaacattgattccgccgtattgttaccggaagtatgggtaggtcgctcgtgccgtctgcgccgctgcgtcatcgatcgtgcttgtgttattccggaaggcatggtgattggtgaaaacgcagaggaagatgcacgtcgtttctatcgttcagaagaaggcatcgtgctggtaacgcgcgaaatgctacggaagttagggcataaacaggagcgataa

SEQ ID NO: 982 - protein, 431 aa, Escherichia coli
MVSLEKNDHLMLARQLPLKSVALILAGGRGTRLKDLTNKRAKPAVHFGGKFRIIDFALSNCINSGIRRMGVITQYQSHTLVQHIQRGWSFFNEEMNEFVDLLPAQQRMKGENWYRGTADAVTQNLDIIRRYKAEYVVILAGDHIYKQDYSRMLIDHVEKGARCTVACMPVPIEEASAFGVMAVDENDKIIEFVEKPANPPSMPNDPSKSLASMGIYVFDADYLYELLEEDDRDENSSHDFGKDLIPKITEAGLAYAHPFPLSCVQSDPDAEPYWRDVGTLEAYWKANLDLASVVDKLDMYDRNWPIRTYNESLPPAKFVQDRSGSHGMTLNSLVSGGCVISGSVVVQSVLFSRVRVNSFCNIDSAVLLPEVWVGRSCRLRRCVIDRACVIPEGMVIGENAEEDARRFYRSEEGIVLVTREMLRKLGHKQER

SEQ ID NO: 983 - DNA, 780 bp, Helianthus annuus
  CDS (1)..(780)
atgaaccggatgatcgaagcgtggaatgcgattccggatgtgccggagtcacattcttctaaaggtgatatggcagaagaatctgatcatatacaaaatccaccaaaaacaccttatataatgagtaagcgaactacaacgagaagaaattcgcttgagaatagcagcaggaaaactgttccagccatgttcagtaagctggatcgcaagaaacccgttaatcagaaactcgacactgctgaggttcatatgaaacacgaaacaaaacgggccgtttttagtgaaatttctgatgaaaagatgcaagaatctcgatataatgaagatagatcgagttccaaagttgtggggagcaatggcggattgaataccaactctgttgaacaagaatccgaggacttatctttgatccgcaatcaacttgctcaaatcgagacccaacaatccaatttatatgatctcctcgagaaatttatcgggagctcgctgaacgggatgcaatctctggagtctcgtgtgcgcggtgtagagtcaacactcgacgagatttcatttgacttagcaaagtcaactggacaggtgtcgaatccggaacccaccttgtgttgtaagttaccaggtgcagatcttattagctctaaactctggaagaaatcagaaatccaacagtacccatctgtcaagaacaaggatcttgaatcattcaactttcaaaccaccggattccatctccgtgccgggctaattaagaacccattggccgaggtgcaccaaatatga

SEQ ID NO: 984 - protein, 259 aa, Helianthus annuus
MNRMIEAWNAIPDVPESHSSKGDMAEESDHIQNPPKTPYIMSKRTTTRRNSLENSSRKTVPAMFSKLDRKKPVNQKLDTAEVHMKHETKRAVFSEISDEKMQESRYNEDRSSSKVVGSNGGLNTNSVEQESEDLSLIRNQLAQIETQQSNLYDLLEKFIGSSLNGMQSLESRVRGVESTLDEISFDLAKSTGQVSNPEPTLCCKLPGADLISSKLWKKSEIQQYPSVKNKDLESFNFQTTGFHLRAGLIKNPLAEVHQI

SEQ ID NO: 985 - DNA, 1422 bp, Physcomitrella patens
  CDS (1)..(1422)
atggaaccccgcgtcggcaacaagtatcgccttggccggaaaattgggagtggttcctttggtgagatctacctggggaccaatctcgtgactcatgaggaggtcggcatcaagctggagagcatcaaggccaagcatccacaattgctttatgagtccaagttgtaccgtattcttcaaggaggaactgggattcccaacatcagatggtacggaattgaaggagactataatgtgatggttcttgatcttctgggacccagtcttgaagatcttttcaatttctgcagccggaaattctctttgaagacagttctcatgcttgccgaccagctgatcaatcgagtggagtatgtgcatgccaagagtttcctccacagggacataaagcctgacaatttcttgatggggctaggcaggcgagcaaatcaggtctatatgattgactttggtcttgcaaagaagtatcgcgatcccactactcatcagcacattccttatagagagaacaaaaatcttactggaaccgctcgatatgcaagtatcaacactcatcttggtattgaacaaagcaggagagatgatctggagtctcttggatatgttctcatgtatttcttgagaggcagcctgccttggcaaggaatgaaagcaggaaccaagaagcagaagtatgaaaaaatcagtgagaaaaagatgtccacccctatagagttcctttgtaaagcttacccgtctgagtttgcttcatacttccactactgtcggtctcttcggttcgatgacaaaccggactatgcttacctgaagagaattttccgagatctcttcattcgtgagggttttcagtttgattatgttttcgactggacgattttgaagtatcagcaaacacatttttctggtggtcctctccgtccagcggctgcggcgggaggttcaagtggagcagcagcagcagcggcagcaggaattggtacagtcccaagagacgcccagcgagcaattgagcctactgatgttgccgctcgaactcgaatggttggtgcgactcgctctagtggattaaatccactggacgcgtcaaagcataagagtactagcccagatgaagccgcttctaaggacatagcccttagcggtcttgcagaaccagagcgcacgcatgcttcttcgtttgtgcgggggagctcatcatcaaggagagctgttgttggatgtgctaggccagcagggtcaacagaggcgggagatggaacgcgggtgttggctggcaaaatgggccccactagcctgcgcacatcagcaggaatgcagaggagctctccggtggcatctacggatcccaagcggacgggacgagattcttatgctggaaactccggaagaaatcctagttcctctcgaaattcgaaagagtga

SEQ ID NO: 986 - protein, 473 aa, Physcomitrella patens
MEPRVGNKYRLGRKIGSGSFGEIYLGTNLVTHEEVGIKLESIKAKHPQLLYESKLYRILQGGTGIPNIRWYGIEGDYNVMVLDLLGPSLEDLFNFCSRKFSLKTVLMLADQLINRVEYVHAKSFLHRDIKPDNFLMGLGRRANQVYMIDFGLAKKYRDPTTHQHIPYRENKNLTGTARYASINTHLGIEQSRRDDLESLGYVLMYFLRGSLPWQGMKAGTKKQKYEKISEKKMSTPIEFLCKAYPSEFASYFHYCRSLRFDDKPDYAYLKRIFRDLFIREGFQFDYVFDWTILKYQQTHFSGGPLRPAAAAGGSSGAAAAAAAGIGTVPRDAQRAIEPTDVAARTRMVGATRSSGLNPLDASKHKSTSPDEAASKDIALSGLAEPERTHASSFVRGSSSSRRAVVGCARPAGSTEAGDGTRVLAGKMGPTSLRTSAGMQRSSPVASTDPKRTGRDSYAGNSGRNPSSSRNSKE

SEQ ID NO: 987 - DNA, 1176 bp, Saccharomyces cerevisiae
  CDS (1)..(1176)
atgtctgctgctgctgatagattaaacttaacttccggccacttgaatgctggtagaaagagaagttcctcttctgtttctttgaaggctgccgaaaagcctttcaaggttactgtgattggatctggtaactggggtactactattgccaaggtggttgccgaaaattgtaagggatacccagaagttttcgctccaatagtacaaatgtgggtgttcgaagaagagatcaatggtgaaaaattgactgaaatcataaatactagacatcaaaacgtgaaatacttgcctggcatcactctacccgacaatttggttgctaatccagacttgattgattcagtcaaggatgtcgacatcatcgtcttcaacattccacatcaatttttgccccgtatctgtagccaattgaaaggtcatgttgattcacacgtcagagctatctcctgtctaaagggttttgaagttggtgctaaaggtgtccaattgctatcctcttacatcactgaggaactaggtattcaatgtggtgctctatctggtgctaacattgccactgaagtcgctcaagaacactggtctgaaacaacagttgcttaccacattccaaaggatttcagaggcgagggcaaggacgtcgaccataaggttctaaaggccttgttccacagaccttacttccacgttagtgtcatcgaagatgttgctggtatctccatctgtggtgctttgaagaacgttgttgccttaggttgtggtttcgtcgaaggtctaggctggggtaacaacgcttctgctgccatccaaagagtcggtttgggtgagatcatcagattcggtcaaatgtttttcccagaatctagagaagaaacatactaccaagagtctgctggtgttgctgatttgatcaccacctgcgctggtggtagaaacgtcaaggttgctaggctaatggctacttctggtaaggacgcctgggaatgtgaaaaggagttgttgaatggccaatccgctcaaggtttaattacctgcaaagaagttcacgaatggttggaaacatgtggctctgtcgaagacttcccattatttgaagccgtataccaaatcgtttacaacaactacccaatgaagaacctgccggacatgattgaagaattagatctacatgaagattag

SEQ ID NO: 988 - protein, 391 aa, Saccharomyces cerevisiae
MSAAADRLNLTSGHLNAGRKRSSSSVSLKAAEKPFKVTVIGSGNWGTTIAKVVAENCKGYPEVFAPIVQMWVFEEEINGEKLTEIINTRHQNVKYLPGITLPDNLVANPDLIDSVKDVDIIVFNIPHQFLPRICSQLKGHVDSHVRAISCLKGFEVGAKGVQLLSSYITEELGIQCGALSGANIATEVAQEHWSETTVAYHIPKDFRGEGKDVDHKVLKALFHRPYFHVSVIEDVAGISICGALKNVVALGCGFVEGLGWGNNASAAIQRVGLGEIIRFGQMFFPESREETYYQESAGVADLITTCAGGRNVKVARLMATSGKDAWECEKELLNGQSAQGLITCKEVHEWLETCGSVEDFPLFEAVYQIVYNNYPMKNLPDMIEELDLHED

SEQ ID NO: 989 - DNA, 912 bp, Saccharomyces cerevisiae
  CDS (1)..(912)
atgagtgtgataggtaggttcttgtattacttgaggtccgtgttggtcgtactggcgcttgcaggctgtggcttttacggtgtaatcgcctctatcctttgcacgttaatcggtaagcaacatttggctctgtggattactgcgcgttgtttttaccatgtcatgaaattgatgcttggccttgacgtcaaggtcgttggcgaggagaatttggccaagaagccatatattatgattgccaatcaccaatccaccttggatatcttcatgttaggtaggattttcccccctggttgcacagttactgccaagaagtctttgaaatacgtcccctttctgggttggttcatggctttgagtggtacatatttcttagacagatctaaaaggcaagaagccattgacaccttgaataaaggtttagaaaatgttaagaaaaacaagcgtgctctatgggtttttcctgagggtaccaggtcttacacgagtgagctgacaatgttgcctttcaagaagggtgctttccatttggcacaacagggtaagatccccattgttccagtggttgtttccaataccagtactttagtaagtcctaaatatggggtcttcaacagaggctgtatgattgttagaattttaaaacctatttcaaccgagaacttaacaaaggacaaaattggtgaatttgctgaaaaagttagagatcaaatggttgacactttgaaggagattggctactctcccgccatcaacgatacaaccctcccaccacaagctattgagtatgccgctcttcaacatgacaagaaagtgaacaagaaaatcaagaatgagcctgtgccttctgtcagcattagcaacgatgtcaatacccataacgaaggttcatctgtaaaaaagatgcattaa

SEQ ID NO: 990 - protein, 303 aa, Saccharomyces cerevisiae
MSVIGRFLYYLRSVLVVLALAGCGFYGVIASILCTLIGKQHLALWITARCFYHVMKLMLGLDVKVVGEENLAKKPYIMIANHQSTLDIFMLGRIFPPGCTVTAKKSLKYVPFLGWFMALSGTYFLDRSKRQEAIDTLNKGLENVKKNKRALWVFPEGTRSYTSELTMLPFKKGAFHLAQQGKIPIVPVVVSNTSTLVSPKYGVFNRGCMIVRILKPISTENLTKDKIGEFAEKVRDQMVDTLKEIGYSPAINDTTLPPQAIEYAALQHDKKVNKKIKNEPVPSVSISNDVNTHNEGSSVKKMH

SEQ ID NO: 991 - DNA, 1716 bp, Saccharomyces cerevisiae
  CDS (1)..(1716)
atgaatgatcctcgtgaaattttagcggttgatccgtacaataatattacttctgatgaagaggatgagcaagccatcgcgagagaacttgaatttatggaacgaaagaggcaggccttagtggaacgattaaaaagaaagcaagaatttaagaaaccccaggatcctaattttgaagccatcgaggtacctcaatctcctaccaaaaaccgtgtgaaagtggggtctcataatgctacacaacaaggcacaaaattcgaaggttcgaatattaatgaagtaaggttatctcaattacagcagcaaccaaaaccaccagctagtacaaccacatactttatggagaaatttcaaaacgcaaagaagaacgaagataaacaaattgccaagtttgaaagcatgatgaatgcaagagtacatacgttcagtaccgatgagaagaaatatgtgccgataatcacaaacgaattagaaagcttttcaaatctttgggttaaaaagaggtacatacctgaagatgacttaaaacgggctttgcatgagatcaaaatccttcggttgggcaaactttttgctaaaattcgcccacctaaatttcaagagcctgaatacgccaactgggccaccgtaggcctcattagccacaaatcggacatcaaatttacatcatctgaaaagccagtcaaattcttcatgttcaccataacggactttcagcatacactagatgtttatatcttcgggaaaaagggtgtagaaagatattataatcttcgcctgggtgatgtgatagcaatattaaacccagaagtactaccatggagaccctcagggcgaggaaattttatcaaatccttcaaccttcgaattagtcatgacttcaaatgtatcctggagataggttcaagtagagatttaggttggtgtcccatagtgaataaaaagactcacaaaaaatgtggctctcccattaacatatctcttcataagtgttgcgattaccatagagaagtgcaatttcgtggaacaagtgctaaaagaattgaattaaatggtgggtacgccttgggcgcgcctacgaaagtggactctcaaccaagcctatataaggccaaaggggaaaacgggtttaatataatcaaaggtactcgtaagcgcctgtcagaagaggaggaaagacttaaaaagagctctcacaattttacgaatagtaattctgccaaagcatttttcgacgagaaatttcagaatccagatatgctggcaaacttagacaataaaagaaggaaaataatagaaactaagaaatcgacagcactgagccgcgaactaggcaaaattatgagaaggagggaatccagcggattagaagataagagcgtcggagagcgacagaaaatgaaacgaaccacagaaagtgccctccagacagggcttatccaacgcctaggattcgatcccactcatggaaaaatttcccaagtactcaagtcttctgtatcagggagcgaacctaagaacaacttactcggtaaaaaaaaaactgttataaacgatctcttgcattacaagaaggaaaaagtcattctcgcaccttcaaagaacgaatggttcaagaaaagaagccatcgcgaagaagtttggcaaaaacatttcggatccaaggaaactaaagaaacttctgacggtagtgccagcgatcttgagataatataa

SEQ ID NO: 992 - protein, 571 aa, Saccharomyces cerevisiae
MNDPREILAVDPYNNITSDEEDEQAIARELEFMERKRQALVERLKRKQEFKKPQDPNFEAIEVPQSPTKNRVKVGSHNATQQGTKFEGSNINEVRLSQLQQQPKPPASTTTYFMEKFQNAKKNEDKQIAKFESMMNARVHTFSTDEKKYVPIITNELESFSNLWVKKRYIPEDDLKRALHEIKILRLGKLFAKIRPPKFQEPEYANWATVGLISHKSDIKFTSSEKPVKFFMFTITDFQHTLDVYIFGKKGVERYYNLRLGDVIAILNPEVLPWRPSGRGNFIKSFNLRISHDFKCILEIGSSRDLGWCPIVNKKTHKKCGSPINISLHKCCDYHREVQFRGTSAKRIELNGGYALGAPTKVDSQPSLYKAKGENGFNIIKGTRKRLSEEEERLKKSSHNFTNSNSAKAFFDEKFQNPDMLANLDNKRRKIIETKKSTALSRELGKIMRRRESSGLEDKSVGERQKMKRTTESALQTGLIQRLGFDPTHGKISQVLKSSVSGSEPKNNLLGKKKTVINDLLHYKKEKVILAPSKNEWFKKRSHREEVWQKHFGSKETKETSDGSASDLEII

SEQ ID NO: 993 - DNA, 811 bp, synthetic construct
ggagagtgtacagatagatatacctgagagggagatggataatagctctgtctcaggacatgaagatgataatgatgataatgatgatgaagaagaagaacataagggctcggttccggttaaagattccggtttacaagattcttgtagtgtaatagatgcttagactgatttgatccgagtgaagagattcttgttcagcaaagatcttggagtgttttagtgctttgtaaatagtacaactataggccgcaagtaaggtgcatgttgtgtatgtttgcagtgattatgttgaaaattcaacagtatgcgtttgcggagatgcttgccattgcaggctatttgatcacactgtttggcgacctcatcatccagcggctgatcctccgcggtgctcgttcgtctgcgcagctaggttctttggacggcgaaaaggatggggctgcgaaattagatgagaagggtcgggcagaagtgaatgcgacgctgttacatcgagcttcatttggacaattttcaacataatcactgcaaacatacacaacatgcaccttacttgcggcctatagttgtactatttacaaagcactaaaacactccaagatctttgctgaacaagaatctcttcactcggatcaaatcagtctaagcatctattacactacaagaatcttgtaaaccggaatctttaaccggaaccgagcccttatgttcttcttcttcatcatcattatcatcattatcatcttcatgtcctgagacagagctattatccatctccctctcaggtatatctatctgtacactctcc

SEQ ID NO: 994 - DNA, 626 bp, Brassica napus
ctgtgcatatgtcaatatcgtaaattataatcattgtatttattggtaattttgtcatttatctgagggatacgcaagtccaaacatcttaaaaatacgttcgaatacatcaatctttttctctattttggttagacgccatatttatcgaatacagaagcgctaactgaaaaacacagcttatgttgacgacatcataataacatatgatcgcgcaactattaaatattttgaatataaaattttaaaatcttgttaggtgtccaaagaattggaaaaacgataagagacctgggcaggcggaaacatcaaaagcgttaaacgataaatcgtatatgacaccacagaagtcatgcatgataacacaacttcagtgacaaaaatacaatttaaacccatgacatataattggtcttgcgatacaaactatgcatctcttttgtttatacatttaatacattatcatcaacggttcttatcagcccaatctttccatgtattttagcgggtaatttgaactcctatcaaaagaaccatgcactcaagcacgtgtccaaacacttaagacacgtatcaattgtgaacttttgagttctctctccctctcatcacctccccttccttat

SEQ ID NO: 995 - DNA, 1906 bp, Brassica napus
agcttcgttcgtgaccagagtttctgagcttatttggtcatatgttgaagtgagtacatatatgatatatacatcggtacggtctcaaagactgtaattagttgatggaacagctacttcatggaacagcttcaccgagagttgcctgctacatattactttctgaacgtaaatttttaatatttaactgtgtgcaggaaaataacggggaagaacccgccaaaaattccatttttgaccccgaaaaatccaactacggaagggggagaaaaggaggataaaaaaaaccaaaaagaaaaaaaggatgagtaggcccttcgtactatggatgatatatggaggacttgatgatacttagttattttggggttgcttaaataaaaccaaagtttatccattatctctttaattaagtactacgtactgattatatgcggatgtctgttctcttgatgtatgtcgtgttaggaaattacaatacatgtactcgattgtggtgtatattctaaaagaatgaagtgatatcattgagattaccatagatgagtgttagcaagttgtattactgagtcattcgaataaagcaattaagcaagcatgcttgtttctatcgtatagtttcttccgactctttttttttttttgaaaagtatgcgaatatcattgatcaatggacctaaagtagctacaagaagcagaggtaatctaaacaacctcccaaaatgataaaaaggaagtttagggaatcaaacagagaccaaattactgattgagattcagcctaacatgatgcttgattgagattcttctgattctcttgagttgtagtaatagtgtgtagcggataaaccgagaaacatgccgtttaatgaattttaaattggggaaaacgacaataactttgacgactcattcaaaattagctgaacattgatggaacacatttactcctaaattagctgaaaattgtattgttgagttattcaaaaactcgaataataagggaataacgcatgcaaactcgagctcacattcttttccgaaccccgaaacaatcccaaagccattttggtcagcttagacataggactagaccaacatacacccaaaaaaaaattatacaccttcgttcagagacgttttctctatgctaataatatttctttgaattactatgataaactgtattaagctaaatttttaggcgatgatatatatataggccatctgaaatcaggaaaatacgagggtgcctatctaaatcaatcggttagttcggttcctatactctccctctcaagaccttcgtcatcgtcccacacacactcacatctcacacgataattgtttaaaacaatcagaattgctcgagtcatttatctctcctatcactctaaaatttcattttacgattcctgctaggcttttaggtcaaacacaaggtcaatatagataatatttccattaaatttctttaaaaattgtaagttcataaattaggaagtaaatgttattacatcgtcgaacaagttaccattgtgagcgacctctaatcacagtaattctaaggtaaatagaatgatttcatcggctctaccaacaatctgtttataaagtaatcaacttagtcatttaattcagtaattgcatatggctaataagaaaaatctttcttcacgcattggcattacatatgcggaacaaaaaaaaacagttaagattttacaagaaagaaaaggtcccaaacatgacaaaagaagtagaagaagccattatgtgatgtgacgtaacgtaggttatatagtccagtcgttttacatggggcatgcaggtgtaccgtgcacgtcgtaaaccacacaactccataaaagccttctctcttcccatcaccaaaccataagaaaat

SEQ ID NO: 996 - DNA, 1063 bp, Linum usitatissimum
ttagcagatatttggtgtctaaatgtttattttgtgatatgttcatgtttgaaatggtggtttcgaaaccagggacaacgttgggatctgatagggtgtcaaagagtattatggattgggacaatttcggtcatgagttgcaaattcaagtatatcgttcgattatgaaaattttcgaagaatatcccatttgagagagtctttacctcattaatgtttttagattatgaaattttatcatagttcatcgtagtctttttggtgtaaaggctgtaaaaagaaattgttcacttttgttttcgtttatgtgaaggctgtaaaagattgtaaaagactattttggtgttttggataaaatgatagtttttatagattcttttgcttttagaagaaatacatttgaaattttttccatgttgagtataaaataccgaaatcgattgaagatcatagaaatattttaactgaaaacaaatttataactgattcaattctctccatttttatacctatttaaccgtaatcgattctaatagatgatcgattttttatataatcctaattaaccaacggcatgtattggataattaaccgatcaactctcacccctaatagaatcagtattttccttcgacgttaattgatcctacactatgtaggtcatatccatcgttttaatttttggccaccattcaattctgtcttgcctttagggatgtgaatatgaacggccaaggtaagagaataaaaataatccaaattaaagcaagagaggccaagtaagataatccaaatgtacacttgtcattgccaaaattagtaaaatactcggcatattgtattcccacacattattaaaataccgtatatgtattggctgcatttgcatgaataatactacgtgtaagcccaaaagaacccacgtgtagcccatgcaaagttaacactcacgaccccattcctcagtctccactatataaacccaccatccccaatctcaccaaacccaccacacaactcacaactcactctcacaccttaaagaaccaatcaccaccaaaaa

SEQ ID NO: 997 - DNA, 2769 bp, Vicia faba
gtggaattcgagggggatctgtcgtctcaaactcattcatcagaaccttcttgaacttagttatctcttgttcagagcttcctgttagcaatatgtcatcaacatataaacatgtcccagaagccagaagatagaagttggatgatagaagtaaagtaatgttactggtggagtaccacaatacaagttcatacaaactttattgtccagaaactaacaaagttgagttcagcatagatgaaagacaaaaagaatatattaaatgacggctgcaaaataaggagtaatgaatacattgacctacctactactaggctatttatacacaatattagggtataataaaatattaaaataccctctatcagacttagtcaataagacattcctaaaatataaattatttccaacaataatttgtctcaaataaaatatagaggtgcaaaagttaaactaagagtgcaaagtaaaattttgagagggctcaaaattgaatataataacaatattagtgtagtttaagaaaactcaggggatgcagttgaactccctcaactgtacgtagctcctcccctggatgcagtgtaaagatttgaagatatattttagtactttggatattgtaggccagagggtgttgaagataaaggttcaggaactaacacattcatccacaacttctatgtgtccatcgtcagtgaaatacatgccaaataggggagttaagaagagtagaaagggtcaagatagtgatgtgcatcgtgatccttcataatgggagtgtggtgagggctcgcatgggagtcatactacaaagagatcatgcataaaaccaactagaagtcaactgtcaagtatgacggctgacaattaaccgtccaccaaatcttccagacatgtttacttgtcccagttttctgatttcttatatccatacattgatgacattattgatgttggtggcgatggagattggggttttcatgctattacagctttacttggatggggtgaagagtcatagcctttgattcagacgcagttagatactcaagttcatcaacaccctcaattgttttttaagttgttttgtgacacgatctctacagttagaaatgcgttacgagtagaacacttggctgtgcagggtatagataaatgaatgacgatttatgatatgggttaccctattgcttctagatacaatgtcgtatttgtctcccttccaaaagacttaacatcacgttttttcctcttgccttatctccacctatgtatacaagcaggcataaaatcattgttgttggttttgtcaacaacaatcattgagtttaggtaaagttgaaacttgattgtccattacctcttgtcactgactgttgaagacagaattgtactgactgtatatatcaacatatgcgagacgcgttaggcagtggaaagacgtagttaggatgtcatcataatttgtttcgtatttttatatgtagcacagtttttatatgtatatattttatcgggtagttttttatcgattcagttatttgagaaaaagtaatgcagacaaaaagtggaaaagacaatctgactgtacataagaaatttccaatttttgaaatttttttataattatcagaaattttaaaatttccgataaaaacatacatgtatagatcgaaaatttcaaatttctagtactttcaaatttcttgcagtaaaagttgtaattttttaaaaatttacgataatttacagtatttaaaaaaaaatccaatcttaaataaagggtataagaataaaagcactcatgtggagtggcaggtttcgtcacaccctaagaacatccctaaatacaccacatatgtataagtattaagtgattgatgttaagtgaaacgaaaatatttatatgtgaaatttaatattcagcttacttgattaaactccatagtgacccaataagtgctaacttttactgtctttacctttaaatgttatattgatttatttatgcatttctttttcctgcatctcaatagtatatagggtatcaaatagtgattatccaaacttaaataagttagaggaaacaccaagatatgccatatactctcaaatttgacactatgattcaaagttgcacttgcataaaacttattaattcaatagtaaaaccaaacttgtgcgtgatacagttaaaatgactaaactactaattaaggtccctcccattagtaaataagttatttttttagaaaaagaaaataataaaaagaatgacgagtctatctaaatcatattaacaagtaatacatattgattcattcgatggaggaggccaataattgtagtaaacaagcagtgccgaggttaatatatgctcaagacagtaaataatctaaatgaattaagacagtgatttgcaaagagtagatgcagagaagagaactaaagatttgctgctacacgtatataagaatagcaacagatattcattctgtctctttgtggaatatggatatctactaatcatcatctatctgtgaagaataaaagaagcggccacaagcgcagcgtcgcacatatgatgtgtatcaaattaggactccatagccatgcatgctgaagaatgtcacacacgttctgtcacacgtgttactctctcactgttctcctcttcctataaatcaccgcgccacagcttctccacttcaccacttcaccacttcactcacaatccttcattagttgtttactatcacagtcaca

SEQ ID NO: 998 - DNA, 1700 bp, Linum usitatissimum
atagtatgcttcagacaaagagctaggaaagaactcttgatggaggttaagagaaaaaagtgctagaggggcatagtaatcaaacttgtcaaaaccgtcatcatgatgagggatgacataatataaaaagttgactaaggtcttggtagtactctttgattagtattatatattggtgagaacatgagtcaagaggagacaagaaaccgaggaaccatagtttagcaacaagatggaagttgcaaagttgagctagccgctcgattagttacatctcctaagcagtactacaaggaatggtctctatactttcatgtttagcacatggtagtgcggattgacaagttagaaacagtgcttaggagacaaagagtcagtaaaggtattgaaagagtgaagttgatgctcgacaggtcaggagaagtccctccgccagatggtgactaccaaggggttggtatcagctgagacccaaataagattcttcggttgaaccagtggttcgaccgagactcttagggtgggatttcactgtaagatttgtgcattttgttgaatataaattgacaattttttttatttaattatagattatttagaatgaattacatatttagtttctaacaaggatagcaatggatgggtatgggtacaggttaaacatatctattacccacccatctagtcgtcgggttttacacgtacccacccgtttacataaaccagaccggaattttaaaccgtacccgtccgttagcgggtttcagatttacccgtttaatcgggtaaaacctgattactaaatatatattttttatttgataaacaaaacaaaaatgttaatattttcatattggatgcaattttaagaaacacatattcataaatttccatatttgtaggaaaataaaaagaaaaatatattcaagaacacaaatttcaccgacatgacttttattacagagttggaattagatctaacaattgaaaaattaaaattaagatagaatatgttgaggaacatgacatagtataatgctgggttacccgtcgggtaggtatcgaggcggatactactaaatccatcccactcgctatccgataatcactggtttcgggtatacccattcccgtcaacaggcctttttaaccggataatttcaacttatagtgaatgaattttgaataaatagttagaataccaaaatcctggattgcatttgcaatcaaattttgtgaaccgttaaattttgcatgtacttgggatagatataatagaaccgaattttcattagtttaatttataacttactttgttcaaagaaaaaaaatatctatccaatttacttataataaaaaataatctatccaagttacttattataatcaacttgtaaaaaggtaagaatacaaatgtggtagcgtacgtgtgattatatgtgacgaaatgttatatctaacaaaagtccaaattcccatggtaaaaaaaatcaaaatgcatggcaggctgtttgtaaccttggaataagatgttggccaattctggagccgccacgtacgcaagactcagggccacgttctcttcatgcaaggatagtagaacaccactccacccacctcctatattagacctttgcccaaccctccccaactttcccatcccatccacaaagaaaccgacatttttatcataaatcact

SEQ ID NO: 999 - DNA, 1727 bp, Linum usitatissimum
cacgggcaggacatagggactactacaagcatagtatgcttcagacaaagagctaggaaagaactcttgatggaggttaagagaaaaaagtgctagaggggcatagtaatcaaacttgtcaaaaccgtcatcatgatgagggatgacataatataaaaagttgactaaggtcttggtagtactctttgattagtattatatattggtgagaacatgagtcaagaggagacaagaaaccgaggaaccatagtttagcaacaagatggaagttgcaaagttgagctagccgctcgattagttacatctcctaagcagtactacaaggaatggtctctatactttcatgtttagcacatggtagtgcggattgacaagttagaaacagtgcttaggagacaaagagtcagtaaaggtattgaaagagtgaagttgatgctcgacaggtcaggagaagtccctccgccagatggtgactaccaaggggttggtatcagctgagacccaaataagattcttcggttgaaccagtggttcgaccgagactcttagggtgggatttcactgtaagatttgtgcattttgttgaatataaattgacaattttttttatttaattatagattatttagaatgaattacatatttagtttctaacaaggatagcaatggatgggtatgggtacaggttaaacatatctattacccacccatctagtcgtcgggttttacacgtacccacccgtttacataaaccagaccggaattttaaaccgtacccgtccgttagcgggtttcagatttacccgtttaatcgggtaaaacctgattactaaatatatattttttatttgataaacaaaacaaaaatgttaatattttcatattggatgcaattttaagaaacacatattcataaatttccatatttgtaggaaaataaaaagaaaaatatattcaagaacacaaatttcaccgacatgacttttattacagagttggaattagatctaacaattgaaaaattaaaattaagatagaatatgttgaggaacatgacatagtataatgctgggttacccgtcgggtaggtatcgaggcggatactactaaatccatcccactcgctatccgataatcactggtttcgggtatacccattcccgtcaacaggcctttttaaccggataatttcaacttatagtgaatgaattttgaataaatagttagaataccaaaatcctggattgcatttgcaatcaaattttgtgaaccgttaaattttgcatgtacttgggatagatataatagaaccgaattttcattagtttaatttataacttactttgttcaaagaaaaaaaatatctatccaatttacttataataaaaaataatctatccaagttacttattataatcaacttgtaaaaaggtaagaatacaaatgtggtagcgtacgtgtgattatatgtgacgaaatgttatatctaacaaaagtccaaattcccatggtaaaaaaaatcaaaatgcatggcaggctgtttgtaaccttggaataagatgttggccaattctggagccgccacgtacgcaagactcagggccacgttctcttcatgcaaggatagtagaacaccactccacccacctcctatattagacctttgcccaaccctccccaactttcccatcccatccacaaagaaaccgacatttttatcataaatc

SEQ ID NO: 1000 - DNA, 664 bp, Brassica napus
taaggatgacctacccattcttgagacaaatgttacattttagtatcagagtaaaatgtgtacctataactcaaattcgattgacatgtatccattcaacataaaattaaaccagcctgcacctgcatccacatttcaagtattttcaaaccgttcggctcctatccaccgggtgtaacaagacggattccgaatttggaagattttgactcaaattcccaatttatattgaccgtgactaaatcaactttaacttctataattctgattaagctcccaatttatattcccaacggcactacctccaaaatttatagactctcatccccttttaaaccaacttagtaaacgttttttttttaattttatgaagttaagtttttaccttgtttttaaaaagaatcgttcataagatgccatgccagaacattagctacacgttacacatagcatgcagccgcggagaattgtttttcttcgccacttgtcactcccttcaaacacctaagagcttctctctcacagcacacacatacaatcacatgcgtgcatgcattattacacgtgatcgccatgcaaatctcctttatagcctataaattaactcatcggcttcactctttactcaaaccaaaactcatcaatacaaacaagattaaaaaca

SEQ ID NO: 1001 - DNA, 1004 bp, Vicia faba
agcttagagcaacttacagacacttttactaaaatactacaaagaggaagattttaacaacttagagaagtaatgggagttaaagagcaacacattaagggggagtgttaaaattaatgtgttgtaaccaccactacctttagtaagtattataagaaaattgtaatcatcacattataattattgtccttatttaaaattatgataaagttgtatcattaagattgagaaaaccaaatagtcctcgtcttgatttttgaattattgttttctatgttacttttcttcaagcctatataaaaactttgtaatgctaaattgtatgctggaaaaaaatgtgtaatgaattcaatagaaattatggtatttcaaagtccaaaatccatcaatagaaatttagtacaaaacgtaactcaaaaatattctcttattttaaattttacaacaatataaaaatattctcttattttaaattttacaataatataatttatcacctgtcacctttagaataccaccaacaatattaatacttagatattttattcttaataattttgagatctctcaatatatctgatatttattttatatttgtgtcatattttcttatgttttagagttaacccttatatcttggtcaaactagtaattcaatatatgagtttgtgaaggacacattgacatcttgaaacattggttttaaccttgttggaatgttaaaggtaataaaacattcagaattatgaccatctattaatatacttcctttgtcttttaaaaaagtgtgcatgaaaatgctctatggtaagctagagtgtcttgctggcctgtgtatatcaattccatttccagatggtagaaactgccactacgaataattagtcataagacacgtatgttaacacacgtccccttgcatgttttttgccatatattccgtctctttctttttcttcacgtataaaacaatgaactaattaatagagcgatcaagctgaacg

SEQ ID NO: 1002 - DNA, 1799 bp, Vicia faba
tcgacggcccggactgtatccaacttctgatctttgaatctctctgttccaacatgttctgaaggagttctaagacttttcagaaagcttgtaacatgctttgtagactttctttgaattactcttgcaaactctgattgaacctacgtgaaaactgctccagaagttctaaccaaattccgtcttgggaaggcccaaaatttattgagtacttcagtttcatggacgtgtcttcaaagatttataacttgaaatcccatcatttttaagagaagttctgttccgcaatgtcttagatctcattgaaatctacaactcttgtgtcagaagttcttccagaatcaacttgcatcatggtgaaaatctggccagaagttctgaacttgtcatatttcttaacagttagaaaaatttctaagtgtttagaattttgacttttccaaagcaaacttgacttttgactttcttaataaaacaaacttcatattctaacatgtcttgatgaaatgtgattcttgaaatttgatgttgatgcaaaagtcaaagtttgacttttcagtgtgcaattgaccattttgctcttgtgccaattccaaacctaaattgatgtatcagtgctgcaaacttgatgtcatggaagatcttatgagaaaattcttgaagactgagaggaaaaattttgtagtacaacacaaagaatcctgtttttcatagtcggactagacacattaacataaaacaccacttcattcgaagagtgattgaagaaggaaatgtgcagttacctttctgcagttcataagagcaacttacagacacttttactaaaatactacaaagaggaagattttaacaacttagagaagtaatgggagttaaagagcaacacattaagggggagtgttaaaattaatgtgttgtaaccaccactacctttagtaagtattataagaaaattgtaatcatcacattataattattgtccttatttaaaattatgataaagttgtatcattaagattgagaaaaccaaatagtcctcgtcttgatttttgaattattgttttctatgttacttttcttcaagcctatataaaaactttgtaatgctaaattgtatgctggaaaaaaatgtgtaatgaattcaatagaaattatggtatttcaaagtccaaaatccatcaatagaaatttagtacaaaacgtaactcaaaaatattctcttattttaaattttacaacaatataaaaatattctcttattttaaattttacaataatataatttatcacctgtcacctttagaataccaccaacaatattaatacttagatattttattcttaataattttgagatctctcaatatatctgatatttattttatatttgtgtcatattttcttatgttttagagttaacccttatatcttggtcaaactagtaattcaatatatgagtttgtgaaggacacattgacatcttgaaacattggttttaaccttgttggaatgttaaaggtaataaaacattcagaattatgaccatctattaatatacttcctttgtcttttaaaaaagtgtgcatgaaaatgctctatggtaagctagagtgtcttgctggcctgtgtatatcaattccatttccagatggtagaaactgccactacgaataattagtcataagacacgtatgttaacacacgtccccttgcatgttttttgccatatattccgtctctttctttttcttcacgtataaaacaatgaactaattaatagagcgatcaagctgaac

SEQ ID NO: 1003 - DNA, 1318 bp, Arabidopsis thaliana
tgatagcttatactcaaattcaacaagttatatataaatgtatagatactacaatatcattaacaaaagtcaccttaaataaatacacatatcttttatgttctctattgttttgcgtacgctaacacaatttctcatatgcaaaaggatgaatgagtaacaaattacctcataagaacaatcatctttgcttacatactaatacaataatcactcaatcaaccaataacatcaatcacataggtttacatacaataatcactcaatcaacttcataagaagaatcatgtttacttaattcatcaattatccccaaaaacaccactattaagtataaactataacatatttgtagtgatgggtcaacatttttatcatatttaaactcgggttccctcaaatcgagaaatagtgaacatgtaatattaattttaaatcgcaattacagaaattaattgaatttggtcaaatggacagaattttatagattgggtggaactagaaaaaaaaaaaaaaagagtatagggtgaattgagtacatgaaagtacatggtaatcctagttaaacgcataatacatgtgggttcatttgtatttttttgtaacttacgagtaaactggctacaacaaaaaaaattagaagatttttttgttttgtagaaaaccctaattttagttatagttgtataactttgataaaattataaaattgtattacgaaaaaagtaataagatattcaaaaaagcctagaataacgtatatgactatgagcatgaaactgcaagtcaaatgctgacagacaaccataaacaaaagaaattaaatagagatacctttaaaataagtaaaatttcatttataaaaaatctactttcttgtgaatctgtcacgttcaataatttgaagaccactcaacatacaaggtaaataatgaaaaataaaatctaccaaaatttcaatcattattatcttccaaaaaaacaaaattatacagatgatgatggtgatatggaacttcgattggctaatattcactgtgtctctaaaaaccatccacttatcaagataagatggaccctacactcatccaatctaaaccagtatctcaagattcttatctaattacatcattctctaccgttagatgaaattgaccattaaccctaccataactccatacaccgcgagatactggattaaccaaatcgagatcatcgtagccgtccgatcaacaagtaccatctcttgaaatactcgaaatcctcataagtccgtccctctttgctctcactatcaaaactctgaatttcgatttca

SEQ ID NO: 1004 - DNA, 674 bp, Vicia faba
caaatttacacattgccactaaacgtctaaacccttgtaatttgtttttgttttactatgtgtgttatgtatttgatttgcgataaatttttatatttggtactaaatttataacaccttttatgctaacgtttgccaacacttagcaatttgcaagttgattaattgattctaaattatttttgtcttctaaatacatatactaatcaactggaaatgtaaatatttgctaatatttctactataggagaattaaagtgagtgaatatggtaccacaaggtttggagatttaattgttgcaatgatgcatggatggcatatacaccaaacattcaataattcttgaggataataatggtaccacacaagatttgaggtgcatgaacgtcacgtggacaaaaggtttagtaatttttcaagacaacaatgttaccacacacaagttttgaggtgcatgcatggatgccctgtggaaagtttaaaaatattttggaaatgatttgcatggaagccatgtgtaaaaccatgacatccacttggaggatgcaataatgaagaaaactacaaatttacatgcaactagttatgcatgtagtctatataatgaggattttgcaatactttcattcatacacactcactaagttttacacgattataatttcttcatagc

SEQ ID NO: 1005 - DNA, 2563 bp, Vicia faba
atccaattaaaattccagaaaattctggttttgaaaaattacttatcgaagagtttgagccgaagtgattatcaaaataagtcttctatatgaacgttattggaaactcggatatgcaaattattaaaaaatagaaaatggaataaatatgatgaatcatattaatataactcatatcaagtaacacgttatttatcgtttgcctcaggttactagtaaagttatttccaataccaatattcaaaagaacacttggtgtgcaagtgaattttcagaatttttctttaagttgtgttgatacacaaaagcacttataatcaaaagtgattataatcaatatcaacatttgatgtaaataaaaaacagttagaaaaatttcttacaatttaattgataacgcaatgctatttgacaaattaatttatgaatattaaagcaagtaaaagaaaaaataacatagacacaggggtttgtcttcagagctccccattttcgtcctcgcatgtgggtgcgtctgcgcctaatttcaatggaattaggataattcttactatacaaaaagttcatacaatataagtgatcaagaaaactccacaaaccctaagcttgttgttgattcaactccttctcctctttagatcttgagaaagaccaaggcacaatagatctcaaatgagtcgttgatattgctactcttttgcattctttatctccaaagctttcgcgcacgaacgatcaaattgtaccttttgcaatcacagaacatcaattgtgatccgtctttctcacgctaattcatttgcgttctttatcttcaaatgatccctttcattcattatctctaaaggacttcgcttgactgcaatcacttcttgaacgtcttacacgaaaaccttcaaatcaaccattcatcttggaggacaaacctgtggtctttccggatgaagacccctataaatctaaaccctatattttcagcgacacgagaacttaatcggacggtaccaaactttgtctagatggtaccccaacggaacatcattacaatgtaatgctagtgcgtatgcatagattggagattgcaaatgaagagcaaatataggttaatttgatggtatcatcaagttatgaatgatgcatgcatgagtatttatagttttggaactttagggcaaaaaggacaaattcaaaattaaaataatttgagaaaattgaccaatcaatcagtatgtgtcgacatttaaatcgtatgtgtcaacacataagttatttttaagctgtatgtgtcgacttatgtgaggttatgtgtctacctaacctagtcaaggctacaagctttaaaacaatagtaaatgtgtcgacctgaaaattgcacgtgtcgaaaaaatttaaagaattatcaaattaatttaacttatcatggaaaaaatacaaaaataatttttaaactttatatctttatataaatttatatattatgtatataatatatattaattgaattattaatttttatttgtattgtaatgattttttttgtgtatataacaattattaatatatttatttcttattggtatttttaaattaaatcaatttagaaaaacttattgtattattaaattaatttaatctataatggaaaaaatataaaaataattttaaaaagtttatttgtgttttaaagatatttactgtgtatatcaaatttatttattaaattattttcttcttgtttttatttaattaaattaattcaacaaacattataatcttattaatttaattcaacagaaactgttttattaatattcacacaaaatatttattatttaaaaatataatatatacctttttatcctaataaaaattttgtgtgtataatttagttttggatctaataaaaattgtgagtgttgctgaaaattgtttgaaatttgaatatattactcgatgatttttttccacaaaaagattagttatgactaaatttgtaatcagaaaaaaaattatatcatgaataaataatatttaatattttataatatatagaacagtgcttgaatagttagatgtaaaaaagttttcttttaattataaaatattgaattcttaatccaaaatgattctattaattcaatggttaaaattttgctacaaaatcagctgcaagcatggaagctgccaagaatccattttcattttagtaatgcattttctcaattctatatgatgagatagaggtaactatttaatctcataatagaagaatttctcgtgagacacaatttggtgagtgatgaagacaaatttaaatcatcctcctattcttaaagagtgtccagattcatcaaattcaaacaaaactccaccacccaatttatgttattttcattttgccacctcaattttgtacatttcaacacacgtccatatgcatggaacatcatgaccaaatgttggtgcatgttcattacataacttgttgttctatacctataaatatcctttcacctcaatgtacttcattcatccacatcgagtaaagttagactttgaattc

SEQ ID NO: 1006 - DNA, 168 bp, Pisum sativum
atggcttctatgatatcctcttcagctgtgactacagtcagccgtgcttctacggtgcaatcggccgcggtggctccattcggcggcctcaaatccatgactggattcccagttaagaaggtcaacactgacattacttccattacaagcaatggtggaagagtaaag

SEQ ID NO: 1007 - DNA, 273 bp, Arabidopsis thaliana
gccggaggagtaaaagagaaggccaacgtacgtcaagagtgtgtttggtttgttgttagtggttagaactttggttctgacctctcttgtaactttttttttccatagtcttgtttatttgttaatgtacttttgcattgtttttgttgttgccatgtttaaagttgtattgtgtttgtataatgttttgttttgtttaaatctttgtagatggtaaatgagaaataagtaaatatttccgagagactgttgagtgacgacgttacttcttgt

SEQ ID NO: 1008 - DNA, 400 bp, Arabidopsis thaliana
aaagataataacaaaagcctactatataacgtacatgcaagtattgtatgatattaatgtttttacgtacgtgtaaacaaaaataattacgtttgtaacgtatggtgatgatgtggtgcactaggtgtaggccttgtattaataaaaagaagtttgttctatatagagtggtttagtacgacgatttatttactagtcggattggaatagagaaccgaattcttcaatccttgcttttgatcaagaattgaaaccgaatcaaatgtaaaagttgatatatttgaaaaacgtattgagcttatgaaaatgctaatactctcatctgtatggaaaagtgactttaaaaccgaacttaaaagtgacaaaaggggaatatcgcatcaaaccgaatgaaaccgat

SEQ ID NO: 1009 - DNA, 357 bp, Arabidopsis thaliana
gaagtttactacacaattctctttccaattatcccaagtaagtcataaaggtcttcaccaaccatttcaccaatgaaggaccagtttttaagaccacgaaagttcatttgaatgtgttttgttttatacggaacattgtagataaagttatgtggttaggttatgtttcttgtttgaatcagtcaagaccaaagaaaatgtgtttgagtgttcttagatattgtatggtttaccaagaacaagacttaagattttcctttacctttttgattctctttttgttgtatcagtctaaagaatgttctctcttaaataaagagtggtttggcaataatgttctagagaacttgggtacac

SEQ ID NO: 1010 - DNA, 979 bp, Arabidopsis thaliana
agacgtcaaattcaacgttgttaatctgatgaatttttcgtgatttgcttttttaatttgcatcgtaatgggtttctggccgttggatcatttttagatgaatctttgtctattgattgatcatttatgtgtctttgggtttgttgttggagttgtaatatctctggaaggcttttgtgcaattgtattgtacggtttaataactataattgagaaaaccagggaatgtgaattatgaaaatgaatttttttgttattgtttattttacttaaagagccctaactaatttagatcataatttacgagacatggaaattttaatgaataataaacattgtgattgatatttttggttttcatttccgttttttatattttatatcaacacactacagtagtacatatttacacatgatttatgtccaggctaaaattgtatattaagcgttgaaaaatcatcgagtgttacacttaggaggggttcgacttccatgtgtaaaaataatactagcaattcgcaaataactttacaaacacaagtcatgactcatgagctaaggttcaaattactttgggttgcaatgtatgcgtttcatttctatatcgttccaatcacagcattattatttccttctttgtgagtcttcttccaacatttcggcgggaatctgtagggagattttcgtcattcggatttcattttgtttggtttcaaaacgtgaatagcaatagatggatgggaatagattcgctaaaatctttgtggggttaatggataataaagttcgtgaaacgtctggacagtatacgaaccatctacctctataaccaaccccacaggccataacagtataacatgattcatgatcaagagttctgctaaaaacaaaaaatcaatagttctgctaaaaacaaaaaaaattaagaaactcttccaaacacatatgagcctaatttattagggactatgccagaacc

SEQ ID NO: 1011 - DNA, 216 bp, Cauliflower mosaic virus
tcgacaagctcgagtttctccataataatgtgtgagtagttcccagataagggaattagggttcctatagggtttcgctcatgtgttgagcatataagaaacccttagtatgtatttgtatttgtaaaatacttctatcaataaaatttctaattcctaaaaccaaaatccagtactaaaatccagatcccccgaattaattcggcgttaattcag

SEQ ID NO: 1012 - DNA, 235 bp, Solanum tuberosum
cctgcagatagactatactatgttttagcctgcctgctggctagctactatgttatgttatgttgtaaaataaacacctgctaaggtatatctatctatattttagcatggctttctcaataaattgtctttccttatcgtttactatcttatacctaataatgaaataataatatcacatatgaggaacggggcaggtttaggcatatatatacgagtgtagggcggagtgggg

SEQ ID NO: 1013 - DNA, 297 bp, Vicia faba
atcctgcaatagaatgttgaggtgaccactttctgtaataaaataattataaaataaatttagaattgctgtagtcaagaacatcagttctaaaatattaataaagttatggccttttgacatatgtgtttcgataaaaaaatcaaaataaattgagatttattcgaaatacaatgaaagtttgcagatatgagatatgtttctacaaaataataacttaaaactcaactatatgctaatgtttttcttggtgtgtttcatagaaaattgtatccgtttcttagaaaatgctcgtaa

SEQ ID NO: 1014 - DNA, 194 bp, Agrobacterium tumefaciens
ctgctttaatgagatatgcgagacgcctatgatcgcatgatatttgctttcaattctgttgtgcacgttgtaaaaaacctgagcatgtgtagctcagatccttaccgccggtttcggttcattctaatgaatatatcacccgttactatcgtatttttatgaataatattctccgttcaatttactgattgtcc

SEQ ID NO: 1015 - DNA, 670 bp, Pisum sativum
ggatcctctagctagagctttcgttcgtatcatcggtttcgacaacgttcgtcaagttcaatgcatcagtttcattgcgcacacaccagaatcctactgagtttgagtattatggcattgggaaaactgtttttcttgtaccatttgttgtgcttgtaatttactgtgttttttattcggttttcgctatcgaactgtgaaatggaaatggatggagaagagttaatgaatgatatggtccttttgttcattctcaaattaatattatttgttttttctcttatttgttgtgtgttgaatttgaaattataagagatatgcaaacattttgttttgagtaaaaatgtgtcaaatcgtggcctctaatgaccgaagttaatatgaggagtaaaacacttgtagttgtaccattatgcttattcactaggcaacaaatatattttcagacctagaaaagctgcaaatgttactgaatacaagtatgtcctcttgtgttttagacatttatgaactttcctttatgtaattttccagaatccttgtcagattctaatcattgctttataattatagttatactcatggatttgtagttgagtatgaaaatattttttaatgcattttatgacttgccaattgattgacaacatgcatcaatcgaccgggtacc

SEQ ID NO: 1016 - DNA, 1722 bp, Arabidopsis thaliana
  CDS (1)..(1722)
atggttgataagcctaaccagattatggaagaggaaggaagatttgaggctgaagttgcagaagttcagacttggtggtcttctgagaggttcaagctgacaagaagaccttacactgctagagatgtggttgctctaagaggacatcttaagcaaggatacgctagtaacgagatggctaagaagctttggagaactctaaagtcacatcaagctaacggtactgcttcacgaacatttggagctcttgatccagttcaggttactatgatggctaagcatcttgacactatctacgtttctggttggcaatgctcaagtactcacacttccactaacgaacctggacctgatcttgctgattacccttacgatactgttcctaacaaggttgagcaccttttcttcgctcaacaataccacgacagaaagcagagagaggctagaatgagtatgtcaagagaagagagaactaagactccattcgttgattaccttaagcctataattgcagacggagatactggattcggaggaactactgctactgttaagctctgtaagcttttcgtcgaaagaggtgctgcaggagttcatatcgaggatcaatctagcgtcactaagaagtgtggacatatggctggaaaggttcttgttgctgtttctgagcacatcaacagacttgttgcagctagacttcagttcgacgttatgggaactgagactgttcttgttgctagaactgatgcagttgctgcaactcttattcagtcaaacattgacgcaagagatcaccaattcatccttggagctactaatccctctcttagaggaaagtctctttcctctcttcttgctgaaggaatgacagttggaaagaatggacctgctctacagtcaatcgaggatcaatggctaggatctgctggacttatgaccttctctgaagcagttgttcaagccatcaagagaatgaaccttaacgagaacgagaagaaccaaagactttctgagtggttgactcacgctagatacgagaactgcctttctaacgaacaaggaagagttcttgctgctaagctaggagttacagaccttttctgggattgggatcttcctagaacaagagaaggattctacagattccaaggatctgttgctgctgctgttgttagaggttgggcttttgctcagattgctgacataatttggatggaaactgcttctcctgatcttaacgagtgtactcaattcgcagaaggtatcaagagcaaaactcctgaggttatgcttgcttacaacctttctccctctttcaactgggatgcttctggtatgactgatcagcaaatggtcgagttcatccctagaatcgctagacttggatactgttggcaattcattaccctagctggattccatgcagatgctcttgttgtcgatactttcgcaaaggattacgctagaagaggaatgcttgcttacgttgagagaatccaaagagaggaaagaactcacggagttgatactcttgctcatcagaaatggtctggagctaactactacgacagatacctgaagacagttcaaggtgggatatcttcaactgctgcaatgggaaaaggagtgacagaagagcaattcaaggagtcttggacaagacctggagctgatggaatgggagaaggtacttctcttgtcgttgctaagagcagaatgtaa

SEQ ID NO: 1017 - protein, 573 aa, Arabidopsis thaliana; identical to SEQ ID NO: 940

SEQ ID NO: 1018 - DNA, 1191 bp, Brassica napus
  CDS (1)..(1191)
atggcttctttcgccaaagtgtgtacctacaacaaacctgttcctgtccttacaactagcctttgcaagtgttcctgtagagtctctactaagaagacactcaaccttcctccattctctgactactcttctcttcgacttgtcagagatgctaagactgaaccacttttcctctcaagacttggacgtattcctgttaagcgaagattcctaactgctgtgactagagctgagtcaaaccaactaggaggtgatacatctgagaacgttgaagaagaggaaaagcagaagaaagcaagtcagttgaagaagcgagtgattttcggagttgctattggacttcctgttggaggagttgttcttgcaggtggatgggttttcacacttgctcttgctgctagcgttttcatcggttctagagagtacttcgagcttgttagaagcagaggtatagctaagggaatgacacctcctcctagatacgtttctcgcttctgttctgttatatgcgctcttatgcctattctcaccctttactacgggaacattgatatttgggttacttgtgctgcatttgttgtcgctatggctttgctagttcagagaggaaacccaagattcagccaactctctagtactatgttcggacttttctactgtggataccttccttgtttctgggttaagctcagatgtggacttgctgctcctgcacttaacactggaatcgctagaacttggcctattttccttggtggacctccacaatggactgttggtcttgttgctacccttatttcattctctggagtcatagctactgacactttcgctttccttggaggtaaggcttttggaagaactcctcttacttcaatctctcccaagaagacttgggaaggaactttcgctggattagttggttgtatcgtcatcactatcctgctatcaaagtccctttcttggcctcaatccttgttcagctctatcgcattcggtttcatcaacttcttcggatcagttttcggagatcttactgagtccatgatcaagagagatgctggagttaaggattctggttcccttattcctggacatggagggattcttgatcgtgtcgactcttacatcttcactggagctcttgcttactctttcatcaagacaagtctcagactttacggagtgtaa

SEQ ID NO: 1019 - protein, 396 aa, Brassica napus; identical to SEQ ID NO: 974

SEQ ID NO: 1020 - DNA, 2418 bp, Brassica napus
  CDS (1)..(2418)
atggttaacggagttcttactagagttcactctcaaagagagagacttaacgagactttagctgcacaaagaaacgaggttcttgcacttctgtctagagttgagggaaaaggaaagggaattcttcagcagaaccagattatcgctgagttcgaagctttacctgaggaaactcaaaagaagattgagggtggagctttcttcgatcttcttaagaccactcaagaggctattgttcttccaccttgggttgcacttgctgttagacctagacctggagtttgggagtacattagagtgaatctacatgctcttgttgttgaagagcttactcctgctgaattccttcatttcaaggaagagttggttgatggtgttaagaacggagatttcactcttgagctcgatttcgagcctttcaacgcttctgttcctagacctactcttccaaagtacatcggagatggagttgagtttctaaacagacatctttcagctaagcttttccacgataaggagtctcttcttcctcttcttaagttcctaagacttcattcttaccaaggaaagactcttatgcttaacgagagagttcagaaccttaacaacctacagcatattcttagaaaggctgaagagtaccttgctggactttctcctgaaactccttacgaggatttcgaggctaagttcgaagagattggacttgagagaggatggggaaacaacgctgaaagagttctagatatgatcagacttctgcttgatcttcttgaggctcctgatccttgtactcttgagaacttccttggaagagttcctatggttttcaacgttgtgattctttctcctcatggatacttcgctcaagacaacgttcttggataccctgatactggaggacaagttgtctacattctggaccaagttagagctatggaaactgagatgctacagcgaattcaacagcaaggacttaacattactcctcgaatccttatccttaccagacttcttcctgatgctgttggaactacttgtggagagagacttgaacgtgttgatggatctgagtactgcgatattcttagagttcctttcagaactgagaagggaatagtcagaaagtggatttctagattcgaggtttggccttaccttgagacttacactgaagatgcagctgttgagctagctaaggagcttaagggaaagcctgatcttattattggaaactactctgatggtaaccttgttgcttcacttcttgcacataagcttggagttactcagtgtactattgcacatgctctagagaagactaagtaccctgattctgatatctactggaagaagttggatgataagtaccatttctcttgtcaattcactgctgatcttttcgctatgaaccatactgacttcataatcacctctactcttcaagagattgctggatctaaagatactgttggacaatacgagtctcatactgctttcactcttccaggactttacagagttgttcatggaattgatgtgttcgatcctaagttcaacattgtttcaccaggagctgatatgagcatttacttcccttacactgaagagaagagaagactcactaagttccatcctgagattgaggagcttttgtactcaaacgttgagaacgaagagcatctttgcgttctgaaagataagaagaagcctattcttttcactatggctagactagatagagtcaagaacctttctggacttgttgaatggtacggaaagaacaagagactgagagagttagttaacctcgttgttgttggtggagatagaagaaaggagtctaaggataacgaggagaaagctgagatgaagaagatgtacgatcttattgaggagtacaagcttaacggacaattcagatggatctcttctcaaatgaaccgagttagaaacggagaactttaccgttacatttgcgatactaagggtgctttcgttcaacctgctctttacgaagctttcggacttactgttgttgaggctatgacatgtggacttccaactttcgctacttgtaagggaggacctgcagagataatcgttcacggaaagtctggattccacattgatccttaccacggagatcaagctgctgacactctagctgatttcttcgcaaagtgtaaggaggatccttctcattgggatcaaatctctaagggaggattgcaaagaattgaggagaagtacacttggcagatttactctcaacgcttacttactcttactggagtttacggattctggaagcatgtttctaaccttgacagacttgagtctagaagataccttgagatgttctacgctcttaagtacagacctttagctcaagcagttcctcttgctcaagagtaa

SEQ ID NO: 1021 - protein, 805 aa, Brassica napus; identical to SEQ ID NO: 976

SEQ ID NO: 1022 - DNA, 1422 bp, Physcomitrella patens
  CDS (1)..(1422)
atggaacctagagttggaaacaagtacagacttggaagaaagatcggatctggatctttcggagagatttacctcggaactaacctagtgacacatgaagaggttggaattaagcttgagtctatcaaggctaaacatcctcaactgctttacgagtctaagctttaccgaatccttcaaggtggaactggaattcccaacataaggtggtacggaatagagggagattacaacgtgatggttctcgatcttttgggaccttctcttgaggaccttttcaacttctgttccagaaagttctctctcaagactgtgctaatgcttgctgatcaactgatcaacagagttgagtacgttcatgctaagtccttccttcatcgtgatatcaagcctgacaacttccttatgggtcttggaagaagagctaaccaggtttacatgatcgatttcggactagcaaagaagtatagagatcctacaactcatcagcacattccttacagagagaacaagaaccttactggaactgcaagatacgcttctatcaacactcatcttgggattgagcaaagcagaagagatgatctagagtctcttggatacgtccttatgtacttcctaagaggatctcttccttggcaaggaatgaaagctggaacaaagaagcaaaagtacgagaagatctcagagaagaagatgtcaactccaattgagttcctatgtaaggcttatccttctgagtttgcttcttacttccactactgcagatctcttcgtttcgatgataagccagattacgcttacctgaagagaatcttcagagatctcttcatcagagaaggattccagttcgattacgtgttcgattggactatccttaagtaccagcaaactcacttttctggaggacctttgagaccagctgcagcagctggtggatcttctggagcagctgccgctgcagctgccggaattggaactgttcctagagatgctcaaagagctatagagcctactgatgttgctgctagaactagaatggttggagctactagatcttctggacttaaccctcttgatgcttcaaagcacaagtctacttctcctgatgaagcagctagtaaggatatagctctttctggacttgctgaacctgagagaacacatgcttccagtttcgttagaggatcttcttcttctagaagagcagttgttggatgtgctagacctgctggatctactgaagctggagatggtactagagttcttgctggaaagatgggacccacttctcttagaacttctgctggaatgcaacgatcttctcctgtcgcttctactgatcctaagagaactggaagagattcttacgctggaaactctggaagaaacccttcttcttcacgaaactcaaaggagtaa

SEQ ID NO: 1023 - protein, 473 aa, Physcomitrella patens; identical to SEQ ID NO: 986

SEQ ID NO: 1024 - DNA, 1176 bp, Saccharomyces cerevisiae
  CDS (1)..(1176)
atgtctgctgctgcagataggttgaaccttacttctggacatctaaacgcaggaagaaagagatcttctagttctgtctcactaaaggcagctgagaaacctttcaaggtcactgttatcggatctgggaattggggtactactatcgctaaggttgttgctgagaactgtaagggatatcctgaggttttcgctcctatagtgcagatgtgggttttcgaagaggagataaacggtgaaaagctgacagagattatcaacactaggcatcagaacgtgaagtacttaccagggataactcttcctgataaccttgttgctaaccctgatctaatcgacagcgttaaggacgtggatataattgtgttcaacattccacatcagttccttcctagaatctgttcacaacttaagggtcatgtcgattcacatgttcgagctatctcatgccttaagggattcgaggttggtgcaaaaggtgttcaacttcttagttcttacataaccgaggagttaggtattcagtgtggagccctttctggagctaacatagctacagaagttgcacaagaacattggtctgagacaactgttgcttaccacattccaaaggacttcagaggagagggaaaggatgttgaccataaggtgcttaaggctcttttccatcgaccttacttccacgtttctgtgattgaggatgttgctgggatatctatttgtggagctctcaagaacgtcgttgctttaggatgtggattcgttgaaggacttggttggggtaacaacgcttctgctgctatccaaagagttggacttggagagattattaggttcggtcagatgttctttcctgagtctagagaggagacttactaccaagaatctgctggtgttgctgaccttattaccacttgtgctggaggaagaaacgtcaaggttgctagactgatggctacttctggcaaagatgcttgggagtgtgagaaagagcttcttaacgggcaatctgctcagggactaatcacctgtaaagaggttcatgaatggcttgagacttgtggatctgttgaggatttccctctattcgaagctgtctaccaaatcgtctacaacaactaccctatgaagaaccttcctgatatgattgaggagttagatcttcacgaggattaa

SEQ ID NO: 1025 - protein, 391 aa, Saccharomyces cerevisiae; identical to SEQ ID NO: 988

1. A polynucleotide comprising a nucleic acid sequence selected from the group consisting of:
(a) a nucleic acid sequence as shown in SEQ ID NO: 436, 438, 440, 442 or 444;
(b) a nucleic acid sequence encoding a polypeptide having an amino acid sequence as shown in SEQ ID NO: 437, 439, 441, 443 or 445;
(c) a nucleic acid sequence which is at least 70% identical to the nucleic acid sequence of (a) or (b), wherein said nucleic acid sequence encodes a polypeptide having lipoprotein activity and wherein said polypeptide comprises at least one of the amino acid sequences shown in any one of SEQ ID NOs: 448 or 449; and
(d) a nucleic acid sequence being a fragment of any one of (a) to (c), wherein said fragment encodes a polypeptide or biologically active portion thereof having lipoprotein activity and wherein said polypeptide comprises at least one of the amino acid sequences shown in any one of SEQ ID NOs: 448 or 449.

2. The polynucleotide of claim 1, wherein said polynucleotide is DNA or RNA.

3. A vector comprising the polynucleotide of claim 1.

4. The vector of claim 3, wherein said vector is an expression vector.

5. A host cell comprising the polynucleotide of claim 1 or a vector comprising said polynucleotide.

6. A method for the manufacture of a polypeptide having lipoprotein activity comprising:
(a) expressing the polynucleotide of claim 1 in a host cell; and
(b) obtaining the polypeptide encoded by said polynucleotide from the host cell.

7. A polypeptide encoded by the polynucleotide of claim 1 or obtained by expressing said polynucleotide in a host cell.

8. An antibody which specifically recognizes the polypeptide of claim 7.

9. A transgenic non-human organism comprising the polynucleotide of claim 1, a vector comprising said polynucleotide, or a host cell comprising said polynucleotide or said vector.

10. The transgenic non-human organism of claim 9, wherein said non-human transgenic organism is a plant.

11. A method for the manufacture of a lipid or a fatty acid comprising the steps of:
(a) cultivating the host cell of claim 5 or a transgenic non-human organism comprising said host cell under conditions allowing synthesis of a lipid or fatty acid; and
(b) obtaining said lipid or fatty acid from the host cell or the transgenic non-human organism.

12. A method for the manufacture of a plant having a modified amount of a seed storage compound comprising the steps of:
(a) introducing the polynucleotide of claim 1 or a vector comprising said polynucleotide into a plant cell; and
(b) generating a transgenic plant from said plant cell, wherein the polypeptide encoded by the polynucleotide modifies the amount of a seed storage compound in the transgenic plant.

13. The method of claim 12, wherein the amount of said seed storage compound is increased compared to a non-transgenic control plant.

14. The method of claim 12, wherein said seed storage compound is a lipid or a fatty acid.

15. A fusion polynucleotide comprising a first and a second nucleic acid, wherein said first nucleic acid is selected from the group consisting of:
a) a nucleic acid having a nucleic acid sequence as shown in any one of SEQ ID NOs: 436, 933, 939, 941, 947, 953, 955, 959, 965, 969, 973, 975, 977, 987, 985, 989 or 1006,
b) a nucleic acid encoding an amino acid sequence as shown in any one of SEQ ID NOs: 437, 934, 940, 942, 948, 954, 956, 960, 966, 970, 974, 976, 978, 988, 986, 990 or 1007; and
c) a nucleic acid being at least 70% identical to any of the nucleic acid of a) or b),
and wherein said second nucleic acid is selected from the group consisting of:
a) a nucleic acid having a nucleic acid sequence as shown in any one of SEQ ID NOs: 1, 939, 941, 947, 949, 957, 963, 969, 977, 983, 987, 991 or 1006,
b) a nucleic acid encoding an amino acid sequence as shown in any one of SEQ ID NOs: 2, 940, 942, 948, 950, 958, 964, 970, 978, 984, 988, 992 or 1007; and
c) a nucleic acid being at least 70% identical to any of the nucleic acid of a) or b).

16. The fusion polynucleotide of claim 15, further comprising a third nucleic acid being selected from the group consisting of:
a) a nucleic acid having a nucleic acid sequence as shown in any one of SEQ ID NOs: 450, 933, 935, 937, 941, 945, 951, 959, 961, 969, 975, 977, 981, 989, 993 or 1006;
b) a nucleic acid encoding an amino acid sequence as shown in any one of SEQ ID NOs: 451, 934, 936, 938, 942, 946, 952, 960, 962, 970, 976, 978, 982, 990 or 1007; and
c) a nucleic acid being at least 70% identical to any of the nucleic acid of a) or b).

17. The fusion polynucleotide of claim 15, wherein said first nucleic acid is selected from the group consisting of:
a) a nucleic acid having a nucleic acid sequence as shown in SEQ ID NO: 943;
b) a nucleic acid encoding an amino acid sequence as shown in SEQ ID NOs: 944; and
c) a nucleic acid being at least 70% identical to the nucleic acid of a) or b),
wherein said second nucleic acid is selected from the group consisting of:
a) a nucleic acid having a nucleic acid sequence as shown in SEQ ID NO: 1022;
b) a nucleic acid encoding an amino acid sequence as shown in SEQ ID NOs: 1023; and
c) a nucleic acid being at least 70% identical to the nucleic acid of a) or b)
and wherein said polynucleotide further comprises a third nucleic acid selected from the group consisting of:
a) a nucleic acid having a nucleic acid sequence as shown in SEQ ID NO: 971;
b) a nucleic acid encoding an amino acid sequence as shown in SEQ ID NOs: 972; and
c) a nucleic acid being at least 70% identical to the nucleic acid of a) or b);
a fourth nucleic acid selected from the group consisting of:
a) a nucleic acid having a nucleic acid sequence as shown in SEQ ID NO: 1024;
b) a nucleic acid encoding an amino acid sequence as shown in SEQ ID NOs: 1025; and
c) a nucleic acid being at least 70% identical to the nucleic acid of a) or b);
a fifth nucleic acid selected from the group consisting of:
a) a nucleic acid having a nucleic acid sequence as shown in SEQ ID NO: 967;
b) a nucleic acid encoding an amino acid sequence as shown in SEQ ID NOs: 968; and
c) a nucleic acid being at least 70% identical to the nucleic acid of a) or b);
a sixth nucleic acid selected from the group consisting of:
a) a nucleic acid having a nucleic acid sequence as shown in SEQ ID NO: 1020;
b) a nucleic acid encoding an amino acid sequence as shown in SEQ ID NOs: 1021; and
c) a nucleic acid being at least 70% identical to the nucleic acid of a) or b);
a seventh nucleic acid selected from the group consisting of:
a) a nucleic acid having a nucleic acid sequence as shown in SEQ ID NO: 1018;
b) a nucleic acid encoding an amino acid sequence as shown in SEQ ED NOs: 1019; and
c) a nucleic acid being at least 70% identical to the nucleic acid of a) or b);
a eigth nucleic acid selected from the group consisting of:
a) a nucleic acid having a nucleic acid sequence as shown in SEQ ID NO: 1016;
b) a nucleic acid encoding an amino acid sequence as shown in SEQ ID NOs: 1017; and
c) a nucleic acid being at least 70% identical to the nucleic acid of a) or b);
a ninth nucleic acid selected from the group consisting of:
a) a nucleic acid having a nucleic acid sequence as shown in SEQ ID NO: 979;
b) a nucleic acid encoding an amino acid sequence as shown in SEQ ID NOs: 980; and
c) a nucleic acid being at least 70% identical to the nucleic acid of a) or b).

18. The fusion polynucleotide of claim 15, wherein said polynucleotide is DNA or RNA.

19. A vector comprising the fusion polynucleotide of claim 15.

20. The vector of claim 19, wherein said vector is an expression vector.

21. A host cell comprising the fusion polynucleotide of claim 15 or a vector comprising said fusion polynucleotide.

22. A host cell comprising a first and a second polypeptide, wherein said first polypeptide is encoded by a nucleic acid being selected from the group consisting of:
a) a nucleic acid having a nucleic acid sequence as shown in any one of SEQ ID NOs: 436, 933, 939, 941, 947, 953, 955, 959, 965, 969, 973, 975, 977, 987, 985, 989 or 1006,
b) a nucleic acid encoding an amino acid sequence as shown in any one of SEQ ID NOs: 437, 934, 940, 942, 948, 954, 956, 960, 966, 970, 974, 976, 978, 988, 986, 990 or 1007; and
c) a nucleic acid being at least 70% identical to any of the nucleic acid of a) or b),
and wherein said second polypeptide is encoded by a nucleic acid being selected from the group consisting of:
a) a nucleic acid having a nucleic acid sequence as shown in any one of SEQ ID NOs: 1, 939, 941, 947, 949, 957, 963, 969, 977, 983, 987, 991 or 1006,
b) a nucleic acid encoding an amino acid sequence as shown in any one of SEQ ID NOs: 2, 940, 942, 948, 950, 958, 964, 970, 978, 984, 988, 992 or 1007; and
c) a nucleic acid being at least 70% identical to any of the nucleic acid of a) or b).

23. The host cell of claim 24, further comprising a third polypeptide encoded by a nucleic acid being selected from the group consisting of:
a) a nucleic acid having a nucleic acid sequence as shown in any one of SEQ ID NOs: 450, 933, 935, 937, 941, 945, 951, 959, 961, 969, 975, 977, 981, 989 or 1006;
b) a nucleic acid encoding an amino acid sequence as shown in any one of SEQ ID NOs: 451, 934, 936, 938, 942, 946, 952, 960, 962, 970, 976, 978, 982, 990 or 1007; and
c) a nucleic acid being at least 70% identical to any of the nucleic acid of a) or b), or
which further comprises a transcript having a nucleic acid sequence as shown in SEQ ID NO: 993 or a nucleic acid sequence being at least 70% identical thereto.

24. The host cell of claim 22, wherein said first polypeptide is encoded by a nucleic acid selected from the group consisting of:
a) a nucleic acid having a nucleic acid sequence as shown in SEQ ID NO: 943;
b) a nucleic acid encoding an amino acid sequence as shown in SEQ ID NOs: 944; and
c) a nucleic acid being at least 70% identical to the nucleic acid of a) or b),
wherein said second polypeptide is encoded by a nucleic acid selected from the group consisting of:
a) a nucleic acid having a nucleic acid sequence as shown in SEQ ID NO: 1022;
b) a nucleic acid encoding an amino acid sequence as shown in SEQ ID NOs: 1023; and
c) a nucleic acid being at least 70% identical to the nucleic acid of a) or b) and
wherein said polynucleotide further comprises a third polypeptide being encoded by a nucleic acid selected from the group consisting of:
a) a nucleic acid having a nucleic acid sequence as shown in SEQ ID NO: 971;
b) a nucleic acid encoding an amino acid sequence as shown in SEQ ID NOs: 972; and
c) a nucleic acid being at least 70% identical to the nucleic acid of a) or b);
a fourth polypeptide being encoded by a nucleic acid selected from the group consisting of:
a) a nucleic acid having a nucleic acid sequence as shown in SEQ ID NO: 1024;
b) a nucleic acid encoding an amino acid sequence as shown in SEQ ID NOs: 1025; and
c) a nucleic acid being at least 70% identical to the nucleic acid of a) or b);
a fifth nucleic acid selected from the group consisting of:
a) a nucleic acid having a nucleic acid sequence as shown in SEQ ID NO: 967;
b) a nucleic acid encoding an amino acid sequence as shown in SEQ ID NOs: 968; and
c) a nucleic acid being at least 70% identical to the nucleic acid of a) or b);
a sixth polypeptide being encoded by a nucleic acid selected from the group consisting of:
a) a nucleic acid having a nucleic acid sequence as shown in SEQ ID NO: 1020;
b) a nucleic acid encoding an amino acid sequence as shown in SEQ ID NOs: 1021; and
c) a nucleic acid being at least 70% identical to the nucleic acid of a) or b);
a seventh polypeptide being encoded by a nucleic acid selected from the group consisting of:
a) a nucleic acid having a nucleic acid sequence as shown in SEQ ID NO: 1018;
b) a nucleic acid encoding an amino acid sequence as shown in SEQ ID NOs: 1019; and
c) a nucleic acid being at least 70% identical to the nucleic acid of a) or b);
a eigth polypeptide being encoded by a nucleic acid selected from the group consisting of:
a) a nucleic acid having a nucleic acid sequence as shown in SEQ ID NO: 1016;
b) a nucleic acid encoding an amino acid sequence as shown in SEQ ID NOs: 1017; and
c) a nucleic acid being at least 70% identical to the nucleic acid of a) or b);
a ninth polypeptide being encoded by a nucleic acid selected from the group consisting of:
a) a nucleic acid having a nucleic acid sequence as shown in SEQ ID NO: 979;
b) a nucleic acid encoding an amino acid sequence as shown in SEQ ID NOs: 980; and
c) a nucleic acid being at least 70% identical to the nucleic acid of a) or b).

25. A transgenic non-human organism comprising the fusion polynucleotide claim 15, a vector comprising said fusion polynucleotide, or a host cell comprising said fusion polynucleotide or said vector.

26. The transgenic non-human organism of claim 25, wherein said non-human transgenic organism is a plant.

27. A method for the manufacture of a lipid or a fatty acid comprising the steps of:
(a) cultivating the host cell of claim 21 or a transgenic non-human organism comprising said host cell under conditions allowing synthesis of a lipid or fatty acid; and
(b) obtaining said lipid or fatty acid from the host cell or the transgenic non-human organism.

28. A method for the manufacture of a plant having a modified amount of a seed storage compound comprising the steps of:
(a) introducing the fusion polynucleotide of claim 15 or a vector comprising said fusion polynucleotide into a plant cell; and
(b) generating a transgenic plant from said plant cell, wherein the polypeptide encoded by the fusion polynucleotide modifies the amount of a seed storage compound in the transgenic plant.

29. The method of claim 28, wherein the amount of said seed storage compound is increased compared to a non-transgenic control plant.

30. The method of claim 28, wherein said seed storage compound is a lipid or a fatty acid.
